United States Patent Application Publication US 2007/0054278 A1 - sequence listing, part 92

SEQ ID NO: 97056 - DNA, 107045 bp, Homo sapiens
gctctaaacttcccctaaaaggaggatggggaatcccaggcagaggcagaggctgaggctgaagccagctacaccctgaatccagggaacttcaatcaacctcaatacccctttgtcctgtcccttcagggcctagggatcctgggtatgctggctcagtacccctatccccatctatgttcagcttgtcccgatctatacagccctcctccctgcctcttgggagcccaagctccacctgcccccgagtcccgtgggcctcaggcccctggccccagacgtaccagttctcagggaagccgtgcagaaacagcatgaggggtccgttacctcgtccagccgagacatagtgcagacgcaggcccgagctctagggggagggcacagcctgaagcctggggaaccctctctcccgaggcttgaaccgtctcgaccccacgcgaccccgcagccccgatagcgcccccgtgcgatcaccttgaggttcaggaaaccgtgctcacccagcgaggggtcgctcaggcaggcgggggacgcgctccgacggcgcccgcagcagccgcgccggggccggcacagcacgtgcgtgagcgctatgcagccgtagaccgccgcggccaccagcgccaccgagaacaccaggctccacatgaaggcgcgcagcagcttcagcgacaggcgcgacggcgccagcagcgcggtcaccaccagctccggcatgtcgccgcgctccgggaccacggcggcgctgccggccaggggcacctgcagcagcggcgaagcggtgtcagggctcaggggcccatcgcccttggcctggggcccctccgtgccgtcgggatttgtgggacgcgctgaaggaagaggcgggcggctccgacagaaaacagccagagcgcaccactcacctgagtgccaggtaaacacctgggcgcgacagggacaggaaacaagggtagggtgcggaggctggggaggaagaggttggaaaggggggaaataaatgggcggggcctagcaggtcctgtgcggggcttagggccggggcggggcccaggaagactcagcagcgggtgggtgagggtctaaaggcggcaattccgggccgggtgcggtggctcacgcctgtaatcccagcactttggtaggccgaggcgggcggatcacctgagatcaagagctcgagaccagcctgggcaacgtggtgaaaccccgtctctactaaaaatacaaaaattagctgggcgtggtggcgggcgcctgtagtcccagctacttgggaggctgaggcaggagaatcgcttgaacccgggacgtggaggttgcagtgagctgagatcgcgccactgtactccagcctgggtcacaacagggaaactccgtctcaaaaaagaaaaaaaaaaaaggcaattccgagcccagacaaaccttaaggaggggatcctggatcttcagttaagtgggcgacacctggagtgaggggcggggcatatgcagagtaggtgcggcctacaagccaaaaaggagaaagagttggaatggtgggcctggcttatgcgggtgggcggggagagggtggatcctagaggaggtgaggcctaacattgggcgaagaaggcgggagcctgggccaatgagctgacggtaggccggggagggggcggtggggtggggtgggcaatgggcaatgagacggagggcggggccgggacctaatatggcgggtcaggagggtctggaagacgaagaagagggacaggcaatgccaggtctaggactaggagggaggcgcgggcggtattagcggctggaggaggcttcgggaggcccggccgacggccgccgcctggtgctacccacccaggggcgcgcgaccctcccttcggtctggctccaaagacctagcagcactgacttcacccagctgtggttccaacggcgggtccagcggcctcggcccggcgccgtcctcctgctggcccaacaggcccgccagcccgcccctgtacgtctgtgattggacggcggcggccactgatgttcaagcgacaggtcctggcccgggagccaatctgcaggtgttgaggcccaggctccgagagcgggccgaggaggcgtggataccctgattcctagggggcaggcctggttcccccgaggaggacccggcctatgaatgactggagttctggggttctggccgaaagaggaagtgggacagggccgggtgtgatggggcctagagtcacagagccttgcggccctgctgtccctgcaagaagccagcttctggccaggcgcggtggctcacgcctgtaatcccagcactttgggaggccgaggcgggcggatcacgaggtcaggagatcgagaccatcctaacatggtgaaaccctgtctctactaaaaatacaaaaaattagccaggcgtggtggcgggcgcctgtagtcccagctactagggaggctgaggcaggagaacggcgtgaacccaggaggcggaggttgcagtgagctgagattgcgccactgcactccagccagggcgacagagcgagactccgtctcaaaaaaaaaaaaaaaagcagccagcttcttcctcctattttgcaaccttctcccgatatccttgaacattttagggacagccatcacttaaccatagagcaaccctattaagtctaagtagcataatcacattcctgtagtatagatcatgaacctgaaattcgaggatgaagtcatttgcctgaagacatacatcttgtaaaatagccatccgcaaagatgtagggaaaaaggcagcgatctgtggctacacctccccttcctcccggaagcagccactggaacgtttttagctttttctttttttttcagatggagtttcgatcatagctcactgcagcctcgaactcctgggctcaagcactacaacctgtagttgggactacaggcctgtgccaccacactcagctaatttttcaaaaacttttcagagagacgacttgctatattgtccaggctggtctcaaactcctggcctcaagcaatcctcaagcctccacctcccaaagtgggattacagatgcaagccaccgtgcctgacctttatttcttgacttaaccaatgtatgacatcagccactgacttgctcacatcactaccccggacgtgccgttttttgtttccctgttagtttcctttaaaaacactccacttgtcacctcttgcccctttccacctcccacttttatccatatacctttgtactgtcaaggctgctaaacattatactgtcctgggaccataactaagtccatgaagttgccacttaaaggtgaatagtggtttatgttctgcctcagtgaacaatgcatctcaagagccgaatagaccactatgattacattgcccatagtgtacaaacttttgttctccctggactacttaaccactacctttcttttgttgtgtgattagcctacatcaaagctttgggggtttttttgtttttgttttttttgagatgggagtctcaccatatcacccaagctggaatgcagtggtgtgatctcggctcaccgcaacctccgcctccagtgttcaagcaattctcctgcctcagcctccggagtagccgggactacaggtgtgtgctaccgcgccccgctaattttttgtatttttcagtagagatgggagtttcaccatgttggccaggctagtctcttaactcctgacctcaagcgatcctcccaccccggcctcccaaaagtgctgggattacagatgtgagccaccgtgcctggcagctttttcttttacaccttccattaaatcaattatctcacaatttgatgttcccaggatctctcccaaccgactccgctaatctggacgcatgggtggtgggtgtctggggaacctcccttcttcctctcctacacatcactgaccccccgccctcatctccccgcttctcccaagtctaccctcaaacaaaaagcagccatcacaggagagtaactttatactcagtacaaatgtttatttttgcaatgagaactgcacaaaaaaaaaaaaaaacctttcgtatgtaagtgaaaagtctacgaattcccttctacaaatgtctaaagtgtttaatacaagtctcagattcactgacataattattggccaagcgatccgtgcatacagtacagtgggggcttgtacacacctcttactctggtataggactaagatttctagtactgtgggaagggttgggaaatggctggagaaattaaatagatcccagttctaattacaacccaggtagagagacacccatcagggaggtgtggagaaggccatggctgagttaaatcttcagcaggaagctgcagagaaaactatccagctcagcagttggacccaggctggggaagtgtctgaacaaaacaaggaacaaaaatgagtgggtgggatgagatggaagaaaccccaaagaacctaaatacgtcacacttgaagtggcacagtggtatatgagaaagtgcctgagtgggcatggacatcgaagaagtggggggacctctggctggatgcctgaaccacaccctcacagggaggtttggcagatccaaagacaataaaggacctttcaggtcaaaaagaggggatgtaggagaataaacagtgctagaaatgtttcaatcagtttgtctctgcatacatataaattatatacttgtatcttacatcttaggggctcttcttgggcgtcacccgtgccttgtggctggggcatgtacatacacaagtggacacacaggcagagcagccacctgtgggctttcttggacaggaatgtgtgtgtatgtgcatggggggtgaggatcctattttgggggatgtagacttatatctaagagtatctggttaaccctgagcttaaatgaaaggaggagttaggttgaggcaggcaaggtgggagaagtggcccaagtcctttggtgagtggggggacaggatggagtaggggggacaggatggagtagggtggaggggaagaatactgtctggagtctggccagggttctgctagagcacaccctccacctcagccagggtccacaaggatgggtaccgggctctgcgtcacagcttcagcttggggtggttgctatgagtctgcgtggctcccgcccagggcagacagggacaggtcacaggagaggggctaggtaatccctggcagtagttcctgtacagaggtggtctggggtccagggggtcccctgggcctagcctaggcaacagttggttcacaaagaaatgtcagggagacgccagcattaaaaaaagagagatgtgtttattccatgatcagtacagaccaaatgcatattcaccgtatgaaagtcaaaccagtcagtgactccagagtttggccaacactgaggcaccagcgtcgtggtgtagagtgggttctcatggcacgcgtaacctcaccaggggctccaattataaaaatttaaaaaaaaaaaaaaaaaaagcatgggcaggagcggccagctggttggggctgggcgccaggtaggggagtctctgccttagtctgtggcgcccccagggcccggttcccacctcatcccttggcccttcctttctcagtaaaaaacaaaaacaaaaacaaaaaccaaaaccaaaaaaaccaactcaacagatctgacattaaaaaacaaaaaagccaacaaatgggtggggggggggggggtggaggggaaagaaaaagaaattgtagctttctggttttataattaaaaatagactaataaagtttgaaactgagtaaaatataggcaggattttttttgtgtgttttgtctttttgtggatttttttgagcttttttcttttttcacaccagtttggtggagtcaccaacaaacttcaaacaaagatatgccaactatgttcactatacagtacagccacggtcacacactacccacagcgcggtggcagccgctgctcaatgaggagacgatcacaccatttcggagataagcagtgccattgtgtctggaggagaagagagaattaaaaataaaatagaattcaacaaaaaatatatatagaaaaaaaagaaaaaaaaaaacgaaacagaaacacaggtgggaaggaactgactttggttggtggcctcactccccggccgagggctacccacgcaggacagtcgcctcgctccggatgccatggacacacacacctccacggcactattcccttttgcacaagcaaacacttacagagagcggctctcaattaaaggcttgtgggggagggtcggggggtctgttcaaggcaaagtcagtgccagcgagggggtgggccggcctcgcccgcctccagcccacgcaggcctgccctggcctcctgggagcgggcggcgatggctggggtgtggggaaagactcccggcgggcaggacatcacgaacgtcacgttcttggggacagaaaaccagtcacggcggcagcaacgatgtcctgtgtatactgtgtagacatttggcggagagaagggcctctgccccgcatgtgrggatgcagggcttgggtccagccggcacttgctcgtaacaaggcgtgtgctgagcggacgtcctgtgaggggtggtgggtggcgggacgtctgtccgactggccgtaaggcagacaggctctgcaatcctcagctgcccgtcaggcctgccccgggcatagcatgcaggagggccaggccctgaggcatcccctggccgctgatcccacctccaccaccgcccctaacactatggaaagtcaatgttttgccagaaaatcaaagtcagaagccacctaggtgcgctcagaaaagattttcttcaaatattgacaatagatcactctggaaattcatgtcaatggtagctgccatctggaggagaaaggaaggagggagtcaggaggatgacctagccaccctgcagctacaagccctcatacccgctaccagcagtcagccccgtagccctccccrtggctgacccctcatagcgctcaccccgtccacacagcactcagggccctacagctgagtccagaggaccacatgccgaccagcagggacggggctcccccgctgcccctccctgtccaggctccagtccccctttcccagctccctcaggagctaatccttagamcagggtccccaccaggcctccagactcacggcttcccggcgtcttcgctcctgctcccgcttccgggccaactccctctgctggtccagcatggactggggctgggagctctgggcctgtggrgtggcggcggcagccaccgcagctgcttgctgttgctgctgctgctgttgctcctggcgctgctgctgctgctgctcctggcgccgacgtgcctcctcatgggcccgccgggcctgctccagcgcatcctcgtcctctcggctcctgggcagagggtcccagtcagcctggggactggtgtggccccaagagtccccatgccccacccagacacccgcccacctcatgcgctcctgccgcagccgctccttctccttctcagcgtgctcggcctgagccttcagggccttctcacgctcctctttctcccgagcggcgcggcggaactgctcgaagctgtcgctggatgacttggctgtggaggagggggtggtcggatgcttctgcactaggctggcccaggagcccatgttcttgattttcaggtcctgcagaacagagaggttggggtgggtgaggggtctgctgtgcctaaagggcatagctgggggtgtgcccagcatggcaccttccagggccaaggggcaagcgacacccatggacctccatcccaacctttttgggcgcaactggagtcttcggctcctgtttctgtttgtccttgtcaggggcccctggtggcggtgcgttctgctctgggggccggatcacaggcctcccgacatccacaggcttcatttccggccctggaacataaacagccggtgggccctggcccacctcaccccagtggggcatggtccaccagccccacagcaagcttatgtccaacacgggcctcggggggcctgagccctggctgtgggcagggagagcactcacgctggggcaggtggacgggggccttgatgctctccgggtgcttggggggctccggccgcagcgaggggctgaagggctcgctgcggatgatgggtgagtggatcttctcctccttcaccaccacraggggctggggctggaccacggaggcagcaygcagctcctgggatggcacaggcacagcggccggtgaggtgggcaggcacccccggccctagcccacaggactatggcccagccctgccagttacctgtttcttaggctggacgttttgctggggtggagactggtgggtcaggctctggaactgtgacatctggggggaatgtatcataagcggggagggggcttcgcggaggtgacctaggagaagggacaaggaatgtgtcaaggggctggcttagaactgctggccctgagagaattgtcgggaaggaaaacgtgggctgtatggagaaactgcatgtgccgcccaggccctgggacaagggtccattagcccagctcaaaaagggtgaagacccacacaagtgactgggcctggtgaggacatgacccctccccgaaagggctgagtgccctgtgtccccctgcatgtggggcataactcagtgtgcagcagagctttctagggccctgtggcaccagtcctggtgtttgaccctcctgtgtgcatcagaatcatctgggatactgtggaaaacacagatcctgacacatgtgggcttggcagggcctgggccctaatactttttaaacccacaaagctcagcctgggttcctgccaactagcctggcccacctggatgattgcagggggtgcaagacccagtcctgggggtggggatgctcaggaccctccccacagtcctattccccactcagcctgcacgcccccacggaagagagaagcctggaattggcctccacctgcgccgagtggggagcaggcggaaaagggcctggagctgtctcttaggaaacaggccagcctgacacctgcatccaacccaaggctgggaaggatccagcagccacagggactactgggccctcaatcacagtgagccagcacctcgggactgtgcagctggagcagctgagtcctacccatccaacatgtggcctctctctgctggaatccctgcaggcaaggggcctcaccgctctttggctagctgcagctcgggacaagccacactgtccacagaggaggctgcccctctgcaacgcttttgctcccagcctagcctcatgcccatctccttccactgtctgycagcacaggcacccttgggttctccaggagccctgctggctggaggcatctattttcataggcctggagcaaaccacaatgccccaggtgtggtagatcctctctagagccaggacccactcctaacgccagaagacactgcagctgcttggagcccacatggtggccaggcccatcctgtccccgcagcccactgctgtgtgtggctggttttcctggcgttgacatctcctccaattctagcacatcgggaccactttgggcactgccaattccattcagtgctggagggccccaggtctggcctgccagggatccacaggcacatgactgcaacagcctcccacccaastagggcagtgccttcagcacctgcygaggctgacctgggcaacggtaggctccaggggctgtggtttatagaaaccacctgcctgctggtgggttcagaggatggctcacggatgactcctgaaagctggctgggggcccagggatgcctgttaagtctctttgggagtctaacaacttggcttttggcctacaaagcccctagcaggatcccaatccacactgctcttgatgccccatcctagcctgctggggcttgggtcacggccagrgacctgaagtagagctggctggagaagacctgcctcagccccgataggtgcctggtgcacccgagtgctggctcttctaaatgccttgcatcccctgtctatcacccccaacaggagtccagccctgcttcgcatgagaacaggcacagccgcacagctgccaggcccaacaccagtatttcccagggaggacaggcagcttgttcttggctcagggcatgcagagatccacttggcacctgactttttttttttttttttttttttttgagatagagtctccatctgttgcccagactggagtgcagtggcacgatctcagctcactgcaacctccgcctcccagactcaagcgattctcccgcctcagcctcccaagtggctgggattacaggtgcctgccaccatgcctggataatttttgtatttttagtacagatagggtttcaccatcttggtcaggctggtcttgaaactcctgacatcaggtgatccacctgccttggcctcccaaagtgctgggattacaggcgtgagccaccgcgcccggcctgcatccagcagcttttgctgggttaggagtaatcacagccctgcctcgttgcttgatttgcaggcagcacccggtacacacccaagacaggcagcaccatctacactgctgaggccaggaccctccaccctaaccctgcagcaccacatcaggaggcactgaccagaacatcccctgccggagccagccaggacattctggttactgacacttaagcgcccaggaaaagtgaaagggtgtggcctgaccaatgctgtcaatgggaaaagggtggcgtggactgggctggaggctggtaacaggcgatgaggacaggtcctgggcgggctctgagctgccttttgagcttccagctcagtgctccccacaccatggttctggctctccctgaacttcattcttcactctgctaagttagctgctacctgtctgcgatcactgcctcttggaagcatatcctgaccccctgaggtgcatcaggtacctcccctgggctcctagcttccccacctagcaagaagtcacctagcattgtcgtgctcctgactcaagagagggaccagaggggccttattctgagtgatctcacctcacaagcaagagagacacctgataaacacacactgtaggaagcaccaatgacccttccaggtccccctccaagctgaggctcagctctgaacccactgcagcctgaagcatgagttaacccttctggcttcctgaggacaaaactataggcccagcaccagcctccccagagtctacgggtgaggaccacttaccggttgagtaggggtccgacttgtggtgccggggtgaatggtggtgctggatgacttgctgaggcttggcaggctgcggcgggggtggctgctggcctgggggcggatgggggggctgctggccctggggtggcgggggctgttggatgtgggtggaaaactgcatgggctgcaagtgcacgggccgtggagggggctgatgctgctgctggggtggaggctggggctggggtggtgggggtggtggcggctgctgctgcagctgctgctgcacagaggggtggggtgggggcggcagggggggtgggggctgggactgcaccttcacggaagggagtagcggcgtagggggctgcaccttctgcagctgctgcaggtacagctgcatctgcatggaggtgaggggtggggcaggtggctcttcatcctccagcagcacttgggggggttgggccatggggggctgtgggagcaggggtgtttgggtcaaggctggtgacacggctgggggccgggcgggcttgggaggcagggcagcggctcggttgctgggccgtgatggctgctggggtagtgcgttgtgcaaagctggaagaacacaacaccgaggcggtgaggcctgagcacctgtggccccagcctggcctttctgctccatcctgacctcatctggactccagtgctctcctactggcctccctcaaactggcactccctccccacctaccgtggcctcccacaaactccagagcagtaaacagcttccagagagagctttagggcggtgtcatcctgccctatgctctgtgtccccagctcctgctccccatgctcacaatggcccttcacgcctcagtgcagaactcggtctctcacttgcccggccattccccaggcccccaggaaggtggccctgtccccatatcccccaggtgagtgctgtccaggttccatgggaggaatcccatctcatgagtgcatcccccaacccctgatgagaaaagctgcagaggggtcccagcttttcccatctaacatgacgcctggcccagcagcagaaataagtcaaaatcatctagattgttactcaaatgatgtcagtgttttagaaacaaaaatcttctgaatcaacgtgttaataactccatgcatgacctgtcttgaggcatctcctttaacttccaagatggcctcgagaagccacagatcttccctctagagaccagagcagctgaggctaagaagctgcccagccagagtgctcggacaccacrtgggtaaaccraggcaggaaggggtctcaacccacactggggcaggccacggctcacctggaggagagaccactgcgtgctggttgagatggggtggagtgctgtgctcaggcggctggggcaggtgagggggcagctcaggctgcggcaggtgcaggatgggctgggtgaagtggccgatggggtcaaagacgctgcctgggagctggggctccaggacgggcacctgggtggcaatgaagggtgggggcgaggacttcatcgccggggctgcctgctgcggcatggagggtgggggaggcgggggtggcggctgctgttgctgctgcggaggtggaggcggtgggggctgctggggaggcgggggcggctgctggggcacaggagccggggcctgctgcatctgctgatggtggtgatgatggtgctgcagacagagagacagacagacagacaggctgatgtcaggcaggcagaactggcccgggccagacccaacgtcccacctaatgaaggatgcccctgagcccatgtaccttcttctgctccctcccggggtgccccttcttttttgacttcggagccatctctgcagaggaaaagagaaggtagtgaggctctgggggagaaggtgagtgagctggccttggatgaagaaagacgagaaaacagggcactttcaggagaaggaccagtgaccctgagaaagggcagccgagttcaatgagggatgagttggtcatcacgggagagggagagacatgcgaggcatcacctacccacttgcctgctgcttttcctagcagggactgtgcctgaaaaagcctcccctgccaagcttcagatcaccacggttgcaccggaagctgagagcttgcccaacgcctcccactactcaagggtcagtcactcactatagtgactgagtgcatggcctggacagcaacctgctcagttttccaacaacctgtgatggttgcaatggtcacattcatcttacagctgagaaaagtggggcttcagaagggaggggacttgtccagggtcacatggctaaaaagcagcttctcgggggcctccaactgcatggccctctaaggcccactcctttccatcctccaaagggaagcagagaggctcagctggggctgagagccacaggacggtgaggaacatatcggcaagggaaaacacagagagcccactccgggagaaaaaaaaggagcaggctggcctcctgggaatgaccagctactaaagaggtagatggacctcagaagtccctgctttgggacacagtcaccatgctgcagacagaaggcagcatacgcccccactcgtgtgggccgacggcttggcaccacagtagggtggatgggtccagggtgtgtctgcccctgagaggtgtactcgagagccagcgtgcccacctctgtcctcaccccagagatttacactaagggacttttgccagttggatgtcccctcaccaaacatggatggtgtacaagccccacagggggacatgagccctggccagtgctcatgggctggcaggtcacagtcgcctgccaccagatgggaggccgggcccatggtatggcgccttttggattcctgtcactgagaagcacctcatggcactgcctggcttcgcctgagctccttgtcagggtgctgcctcttgctgctggtgttggaggacacatgctttgcccaaatccaggctccttccacttggatctgcttcgtggagggccaygctaagcttctgtgaggcacgtggccctcagtgcagcatgccaccaaaagggatggggaaggaccttgtgccctgtaagagctcaccactccacgccagacaagacacagacacagacctcagcagctacagacacacgtcctcgtacaaatgaccaggggctgcaactggggacacgggggaacctggggccccgcctaaaacctgcatacagggctcaggacgctctgggtcagagtatgacatctgatgagagagatactgttgtgggtgagacatgccagaagggaaagcttgagtagatttgcagtgtcagggcaacagggagtctgactgctgtggtggtggggggaggagcgctggctgcagaggttggcagccacaggaccagggggaccctgcacactagggaactgggaagaaaaggccagggcttctctcctggcacaaggaggtgatggagccgcgctgtctgggggcatgctgggcacaccttggaggggacccggggcagaaggcggaaggtagggggaagcagcagggccaccgtgtgaagtccgactaggagaagcctcagggatgtgtccagatatagagttgagggaaaaagtgtgtgtgcaagggaaggatatgctggggctcgcctgttgtctcgtggccttggaagaaaccttgtttttttggttgtaaaagagggatggtcactctaacccctcacagcctgcaggctgtgagcagaggcccataggagaagatgtagggacaaagcgcagcagggcctgtggggggttccagggggcatgtctcagctgccttggaaaggccacagggaatatcctgaggacttgtctccagggccccttgcaagtgctggggcccccaggcaaggcaggcctaaaaagtgggggagagaaggcggcatgtgcacggcagacccccaggaccagatgcctaaaggggctggtggtagaggtacccccttctggcccatgtggtctgagccttgtgtcagagttaccagtaaaagacaagacaggaagtgcacagcttcacaacacaccagccccaagacacccccacacaaaactctctagaaagggttacatgaagatggcctcaagtacggtgtgatctttattccatgacaatcttcaactcaacacaaatttcatctttacataggatggtaattgtacaaagaaataaaatgttttttaaaaatccgattaaaacactgattccacccaccccccagccccactccagtgaaggaggtaatggagggtaaggtcagggcagaggagaggagtccccatctgcactgagcggccgcctcccgcccctcctcaggacccacagccagctggtgcgtcgaggcccggctggcacttcctgcacaggaggctgccaacaagaagtgagtgggcactgtcctctctggctgttcctggggcaccaagcacaggtgacagcttaagtctaatgagctttcaagttcaacaagccctgaacgttctctgccagatggaagccccacgggcaagaaggacagggtccctggacagcgaggttgaaaggaccctggaggagagctggcttgtggctatggcccatgtgcacacgtgtgtgcgcgtgcgtgcgtgtgtcgggggcagcatgcaggcccgacactggtaatcaggctgccatttggtccaagaaagcagaatcttcccagaaagacaatgccagcagctccccaattgtcctgtgggaatctgggcatgaaggctctcctgcctgctcctgtctcaggcaggcgggactgcaacaggaacacatcaggcgcaggccaaagggcagctgagaatagtttgtttggcaaacagagcttaactggaagctggatgcccagaaaggatcaagagcagcccaggaactcctgagcatcaatgcagggccccgggaggccctggtgaggccagggctagcccctgcttccacagcaaatctggggcagttgcagctgctcaagcccaaggagctgaggagagctgccagagttcccaggcaggtggggagcctgcacccaagggcttgcccatggtgatagcccacttccagttccagaagaaggcaggcctctaggaagcacccacaatctacactttaaaaaaggagaaaaaatgaaaagcccctgaaacgcagatgcagttcctcaggggacttttcatgtcaggcagttttctgctgagatgctggatttgtgaccaaaaaagggctggtatttatttttagagcaaaaaagcctatttgtgtctctgggagggcttggatgatgtggccacactcgcctgccccaaccccaggggctgtcgtcattctaagggactgaagacggggaaaatgttcacactgttaacaccartcagaggtgtccatggggcagtccctgagggtctgtgacaccctctctggtccaccagcccagactcaccccactagaggaggcgggtggggtgaggtggggttgrggggatgataggcccaaggcccttcaccagtgcctgcctggcaggtcctgcatactgcagcctggttccaggaggtactttccctatgtgacttgagaagacggaggccaaagaaactggggaaatgcccaccaggcaacttaagcttttggaaatgcacgggaacaatggagacgaaggaggaaagactccaaaaggctcagagtcagcggtggctcgagccttacagggcaccagtgagaagcatgctgtgggaagagcctcactgagccttccagggtctagaggccttgcctctaaagctcccactccttatctaggacagctctagaggtcagagtgttcttccgcacactgaacgagagctctcctggactgatgtcactgcaaggttcaggagggaagtagttagggtccaaagtcccagaaaaagagggatgggacaaagagagaaaacatacttggggtctggctttgcacacagagtagcaccacatgaatgcatgtgttggggattgtcatcaccctccaggagatgccacccacccagaggaccccagagaaccaggaaggctgggcaggacagccaggcagtctttacacagagaggcctgggcggctggccaggcaggcagccttcccgaaggcgggactaggcgtgtgctgctggacatgactaatccaccccgggggacaggcccagggctctgaggaattccataacttgatggagtcctgtccctttcacggaagaaaatggacttaagctatagcttgctgggaaggaatctggaactgaagaccgttttattaagagtccgtgtccaatgattaggcaggacctacgtagagggagagagaaaccagtgtgagagaaatggtgtggaatgtaccatttaagtcacaagaacagaagaaccgcagactgagccaacctcctgcgccctggtggctgatgggcacaagaacggcactggagactggagccctgccccgtgcctggctaaccctgggtagggacagacccaccgcccgcttagaaaggtcacagaggcagaatgcatggatgccttggaaaccgcccccagcctgctcagcttctagagagtggccctggttcccactagcaagctccacgtgtgccctgcctgagcgcacgccggcatttcctttactgccctcaagtggcttcttttgaatttgagtgatgcccctgccctgtcccaccagccaggtgtggcaagcccaccaggcccctgctgactctgagctcatctcacccaggggctgtgcactgtctagtctcaggaaggcgatgccagcccttcctcctgggtctacaagaaaggaggtaccagaatgcaggacccccagtggaggggaaagagcaaacagcctcatctctgcattcctccagatcccccaaacaaaaagctcaaactctaaaaagcagaacctattatatacactgttgaggaggagaaaaaaaagaaaaagaaacaggctaaggaataaagtcttgtcctttctttccttttttggggtatccaacatggctccctggaccagggaggggcactgggcttgttcccacccacgtagcagagcggatgcctctgctggagtcacggatgcaaccgacgtgctactccctggcccctgagtgcgggcatgggaaaaacccgcccactggcggcctctcactctgggccacattccacaaggctcgccctcacccgcccatgaagccccagaatccctccagctgcaaatgctggctgtttgtggggggagtcacctggctgtgcagacagaaaggctactgccctatcttcaagtctcttcctactcccccacctccagggtcctcaccattcccctaggtaagcgccacactctggagcaggcaagcagcaggcctggagatggactaagtccctcaaagaccctgggggtcaggaagctgaggctggttgtgtggtaagaacgccccatggcctctgtctgcacttcccagctcaaatctttccaaaacatcaagcattcctttttcccctggagctattaagaaacacccacatgctccaatcctgggaaaaggaagccaggaaactaaaatagctggactgcgctcccgttccaactagacgaccagaccaaagcccaggaggatctctcacacctccctgagaccctgtcccagcccaggtagctgaggttaaacgggtattcctaagagggacataagctgtggggacacttctgctcacaaagacctgtgcatgacacttgggaagaaccagatgtcagctatgtgacaagtgaaagctagaagattcctaggacatgccctgccccatgtgcttggcagacctaaccccagtgctaatgacagcaaagccacagtactgtccacagcccacctgggacagtgtcttcctccagcctgctccacccaggtctgcagatgccctaggggtggtgggagagtggcatttgtgccctacccctgcctgtctcaatacagaatcctcaagcagctccaggctttagctggaatcacagctcaatggaagaccacagcccaagcaatagctggaatcagaggaagtggtagggctggcccactgcactgcatgctgctggggcagagggtggggaatacatggtggcctgggacacagctgggaaagcagcacccacccccgccatcctcctcctgcctgtgttccgttgctccctgaactagagcctggccccagaggaccaccccacgcctgcatcagtccacagcatcccggtctatggatagctaccaagaggggtgttcatgtatcacaccccccagcctcaatctagtgactccattcgttttcttctggtgattcatgtctcagggccgttgtcagcggaactaaccccgtagtataagtgacaaaaataggccctttcaggaatttcggctccaatccaaatggaaacacaagaacggggggggggggggggggcgcgggcctgcaaatcaactaggcaccaaaagaccaaagggaaataatgttcccccaccctgacccactcccgttaaggcagagctgcctgtaacgggccatggacatcagggctgccgggattcctggacccaggagagcagctgctgaaggagctacgccccctctgccccccgccctgagagtgcagagtcctgtgcgggacagggcagcagaaggctgtatttactggtgccagggtgtgggttcccatttcgggatctgccgtacgaaaccctcgcagcggcccctcctgagaggagaagcaccctgccggcccacgacagagctcactcagtgcacacagaaggcaaaggaaagcccctgctggccaggattgggaagacaaaagggagccaggcaaaacccaaggtggggagggygcctgggaagaggggaaggccagagcccagatagctgcatgagcggccagggctggaccgccagagcctgggagcctgggagccagcggctctgagactgtaaatctcgccctccttcccgccaggacagctgttcccaggactctcagattacttgttgcacaatctttccacttttttttaaagtgggggagtgaaaaaataataaaatctcggcagcggcaggaggggtgtggggcactcgttcaggaaaccaggagcattcccactcctctcccaaagcagaggagcccagaagagggacgcagaggccaagggcaaaggccaygatcacacactggaaatcaggatgtgatgkccacagccctctaaggtgtcttgtcttgtgagggctaaagcagcacactgccacgaccacgtcatgtcattttagttaatcaggtcccctgacaatttcagcatctggggtttccacttggtcactcagatcctcagatgagaagactacaaaacccctggtaggagaagtcaactagaaaacaggaggtgcaaaaacccagaggaaggcaagctggaggcttggctggcatggaaagtgaaaagtcagcggccaccaggaatgctaattggatccaagaatacagccattcaccccagtcactctgctgcgagtgggggccctagcttcgggtggcaaagccagcccttcctgggcagccatggggtgcagtgcctcctgctggctgatggattacaaaagcagtgtggggagagtaacggttagagatgaaagggtgaaggatggcgacagggaaggccaggaggycagtgagctgcccacggcattctgcatgcagttgtggtagagaatgtgggcatctggagtcctggagggtccttcagcccacttcaaggcaagtctcctcactcacctgggaagcagagggcaccaggctgtccaagggaagaggaatactgacaaggcccgaggtgccacctacccccaccccatctgtgcacacacacctcagagcaacatggctctccccagctgccgtgaagggtcctcaatcttccttggcacgatcaagttatttacatgcactgattattgagggttagcatttatttctagttagaataaaatcccagggatgggacaggcccgtgggagaacatgcaggagtctactgccaaaacacaggtttcccactgtggatccccactccccagtctgcctgagaccctagggccagctctcaggtggtctgcagcacgccagctcactgacagctgcaccagcctagcggcaaccccgttggccgtaaacacaggatgttagctccatctctcagcaggggctggtcgccaggccttctgggcaccatggctccctccctagcctctcccctgcgccagcctgagcatctgcgcccctgagaataatgaggaaagtgcacacttggaggagagcagtcccctctccactcccacctggcacccagcatcactacctgcctccacctcccactgaggctgctgctcagaaggtgggctctaatggggaacccagggtccaacgtgcagacccacggggcttgaaaagaagggactgttagttagaactgcaggagggacacgcaagtccaggtgcgtgtggagttagggcagattcaggagcagccaacacagcaacgagcacactctggggaggggtaggcaatggctggggcccaggtgatggcagggccagcagcagactggcgatgcggctggccagctgcagtctgctccacatccaccagaaaccagcgaagcatctccctgaagcggccgcactgcacgtgactgtgatacggggaaggccctggggacacgaagtctccactggtgcagaaagctgggtgtggtcacatcaaggtcaacagcacagcctggacccccacgcccacagtcctcatggcccagcttccccgcccaccatccagggctccgcagtgtcaacgcccttggccattcatcctccatgaccagaccctggcagggagagcataacggccaggccgagagaatggacactactgcacagagtgcagggctattcatggccccagggagacagttaacaaagagacagacagacagaggaacccagcaagttctgggagtgccgtctctgggctctagcatcctggacacaggaccgagctagtgccaggcacaggtgggaagagtttggtaagacacgtagaacacaagtcacctaacctgtttcggagtcttcgctgtcagaggagctggactcactggagctctccgactctgaggacgagaagcccttcatcttggaggagccggcaatcacatcaactttctcagctgcaatccaagcaatgggagctggtcaggcagggctgtggcccaggaagccgctctaagccatgggcacaccccatccatctggaggaaggaccagtgaggagcctgtgcacggtgggcccaggggctgctcccaactgccagctgccactcccagaacccacgtggtcccacagttcccatgggtagactgcttacaatggaatttcaaggttccttcaatctctcaaaaagtctcctttggggggtttatcaaggattcaagagaccaggcagaaggataatttcctaacacaaggtaccgctgggcataaggcttggattctcccagttactcttctagcaggggaagaagaagatccaaaaggaacatgctgccaaaaggtaacgcaaggcagggagagacccccgggggtctctcagcacagctgttcagacgcacgctggaatcatcatgtggtgtgccccaggtaggggcccaaggaccccaggagctagtcagggctggggacaaagactgtgtgcaatgccctgacaccgatcctcagaggaaagccgtaggccaggatgagctgtgtgacacaaaagagctgcctggaagagtccagaaaggatgccacaccgaactgtccctgctagagagggacagaggctggctcagtgctgcataacgtatcggtacacaggtcctgggaccctgcagacccgcctttcctccttccccaaagaggccggaggaagactcagcagcaggtagcctgggttgaaagcagctccggcttagaacacagctgcaggcaacaaggtgcagagaggccccagacaccaccagtcagatatgtagaaaggcactgacagcctaggggtgagtgcaatgtcacaacctttcggaggtttctgtgtcaagaacacagatattataattggaaaaaaaaaagggggggggcgcagaaagagtggactgagcaaggagggaaaagttactctgagggtgcccacagaaggaaccccatgcccagggggcccaagcacaccttgaggtttccttttcttccgcaaacaggaggtgacatagcgctccagctcacgcagtgtggacggcttcagggtctcaaagtcgatttcaatctcrtcggggttggaattcttcagggagggctcccgtgactggatgatgtgcaccacgcggcccagcttctcgccggggagcttgttgatgtccaagctgagctgccgcttctcctcataggacataggcttgcacttgtcctcttcctccgactcatacgtgggagggggcttgctcttcatgggcgctggctccttcttgctacgaagggacgatgcagacaccatcaagaacgggccccctgaggaagccaggcactcattcctccacatgtatgttggggggaaggggtgcccttcccataccccccacccaccagccttcacaggaaacggggcatgggcaactcaatctctgggagcacccagtggagaccgaagcaaactgtgactggaggctgcccaagtgggggatgcactacagccccatccttgccgcctatcctccccaaccaaacatggtgagctccgaaggctcatcctacagaaagaggcagagacagtgcagctaagtcctgtgtgcaagtggccaccagcctggcctgtgaagccacggctgcagaggggcagcctccgcacccaatgaggacagggaggggcagtggcccacacagtctcagagcaagccctggaaggagggtccccacccaggacaaattcaggggacacagacctcacattgctgttgctgctattatttttcttcgtctttttaggaggaggttccttggctttgctttttttattctcttccacttcctctttccttttgtgcttttcttttttcttttccttcttgtytttctcctttttctttggtttgttctgctggggctgagagagggctgcaagctgctcgtgcacggctttgagctgtagaccagacaggcaagacacacactcagggctgaaaccaccttcctgtcacccaagacccaggcgtctgctccaaaaaacatgcracagcatgcacctggggcatcagggtgtgggcataggggaggcaggggaagggaaggcccccagctttgcgcctgtcatgttaaccagattcctaacaagactatctccacccattcactcaactccaaagactgccagtgtcttcctcaccagaggagctgatcaagccgacagacaccaagtctcacggccatcctgatcgcagaaggagggcccctaagaatctaagtaagagcacacggacacgtcaggcacgaagggcctgatgrctggctatagggagaggagcaaacaggtagccccaggagagacgaacatcctggctcaacctcctccttccagatactgaaaggatcaagccacctcctctctgcccagaaaatggccatgtccctccccatccccaaccgcaagctcaacacatatatcatacatacgtgtatgatcaacatgcatttgacctagcaaaggggaaaaggccacaggtggtccagtgggaattatgctcccttgggaactcagaaccaagaacatctcttagaaacttctggggaggccaccctggtccacggactctggggattaagaatggagccaccaatgccctcacctgctcctggagctcagccagccgctgggctcgctcctcctcagagtcatcagtcgaactgtcactgtccgaggagctatcgctgctgctgtcgctggatgagggcggggccacaaccttggtgggagggggcactgccggggaggacacggccaccactggctcctcaggctcgtccggcatcttggcaaagcgcatttcgaacacatcctggtgagggaaagacatgctgtgacggctgctgggtacccaggccgcggcctagcatcacctgccctcattggctgctggggccaactcaacagaaagcaaccgagggcgaaagaggatggtgatcctgtctctttgctgccgagacaggggcaagggccagccaagggcctctgacaactcttgcaacactcttctctcaaatctcactttgaagaacaaggtggtccagagatagcggggcactcactccctggaggacaccgcccaggcaaggacatgagacccaggccactaagacagccagctcactgaagtctgagatggtactggaccaagggcatcctcaaaccccaaaacagttagccgaggctcccaccagatgcgtgcgggggagcaggagttgtctgtggtttgagagggcattccaggcagaggacacagcacacgcagaggtccccggtgggaatgtacctgccacaagcgcacctcctctaggggactaggctctgctgtagcagacacggttctaagtcggtctcctcattcctcagatagcccctgcagcacttaaccaagcagggctgcaccactggaggaggcatctccagcacacacaggacaaggtaagagaggtttaggcagcaggtgtggggcactgaggacaggctacaggagggagccactgtgcgcaggagaccctaagacctttcaaccctaagatccagcaatcagatggaaccacgtggggtcatggagctcagggaacagcagccatgcatggacactggggtctggccacacatactgccagccagctgtcaagtccctgccctaccccgggggcgctgtgctcaatccagtgatggctcaagacagaggcagaagcacaggcctggcttcccagcaggattctgggacccgcttcaaaccaggaataaactgatcatcgtggaaacacaccatggcaaagaccttcccccaaatgtgtgtcagtgcttcagagaggaccacggccctggaatcccctcctgatggctcaggaaacactccttgaggcttcctctccyacgctgctggagcaggcatcccatataactgtggtgttgattccctcccctccaggacacccggagtatgacttcttttagccaataactttttttttggagacagtcttcacccaggctggagtgcagtggcgcaatctcagctcactgtaacctctgtctcccaagtagctggaattacaggtgcacaccaccatgcccaactaatttttgtatttttagcagaggcagcgttctaccatgttggccaggctggtcttaaactcctgacctcaacagatccacttgccacagcctcccaaagggttgggatgaccagcgtgagccactgcgcctggcccaataacttttttctttctttcttcttcttcttctttttggagatagggccttgctctgttgcccagggtggaatgcaatcaatggctcaatcatggctcactacagcctcatcctcctaggctcaagagatcctcctgcctcagcctccttgagaactgagaccaccatgcccagctaaatttttgtgcagacagggttttgacatgttgcccaggctggtctccaactcctgggatcaagggatcctcccacaaggtggtctacaatgaaaagtgccaggattacaggcatgagccactgcacccagcaaatacctttattcagaaataactccttgagcaggtctgagacaaggaagaagatacacaacaagggacgaccagaggccatcaccagttagcctcccaggagtggggcccagggaggaaaaggtggggggcttcacatcagagtggaggccccagtgagagagtaagacagatccctagccctgcagcacccggctacgtggcaggtgggtagtgccctggatgtgggtgggctcaggtcccaaaatgactccaagaggcagctggggccacatgagcttctggaagagccaggcctgctgccaagcagcaggaagcaggttagagaagtgggcctcagaagtgccaggacatcatgaagggagataatcagctatgcctcccaggacaaagggartgccctctactgagtggtagctacctcagcgaactggtctgtaagcctgggccagcttcaagacttgaggatgtccttgttcctccccaccaggtgatgactgttgggtaaatgctggggtgggggtgtgtggcattcactctgaggcctccttccattccctgggtgctcatggccctggctctccaaaggccccaacaacaaagagcaaaaaatacaagacacaaagtcagctaagatgagaaactaacattggtgggactgggaactgccagcttcctggcgtgtccagttgtgtgaccctgtcatccttccctgtctcttggatgtgagaactcttgttgtagcctgagtggggggcatcctgggaaacccacaagccagtgggcccagggctgctgtaggaaaaccttgctgtgtggcttcaacagtcacaagtctccaagtaccagcttgatggtagacaggaatgacgagctccctgttcaaggagctcagtctagctggaaacagaaaggtgaatgaacacatgggcagcaaggggttgccatgaactggaagtgtgctgagacctaagagtgaaaagaacacagtcaggggtgctatggggccagcaagaggacagtaaagcccaattcaagatgcaccgaggcaagcctctcacaagggaggatggtgatggtgaggggtagcaggcaccagcacccgccagggaacaccgagtgcaggcattctgttgggctgacagtctcttgagacccagctgaggcccagccccctgcccggcatcccacagacctacacctcactcctctggaggtctgggtctgaggtcatgcttctcagtttcagcacacctcactggtttcagacaagtatctcagctgtcaggctgtggaacacaggttttctcaatgacccgagaatttagaggctcagagagaaaaataaagtggctccttttccaagtaactttccagataatcccacttcttgggcccagccaaattaagagacccaattaagcaggtcccaatagctcctgaagaagtgagcaagggctggaagctttgtccctccccttccctgatggagaatttgctctctacctgctgatgcagagaaagtagagagaagtaagaaaaacaaagcctgaaatgccacaaacacaactgcccactgaagagaagcctgctctggaaccctccaccatcaactctgttgctcaaacagaaacacctctaccaagcactggcagagaggtgtccctcccaagggcaggcgaaacaggctgggccagaggcagcccacctacagcacccyccaccccttgcctgcactaggcccccttgagattgaggcctgtgtccactccagtccrgcacctggagcccgtgtgtaggaagaaactctactgctgcagtgtctgtggtgtgacagacatccagtggccttggtaaactctacattcaggcaggcttactcccctctcagaaggagaaaaatgcaaaaaaaaaaaaaaaaaccacttaaaacccaaaaatctttgttggagaaaatctgcgaaaaggaggtggctccagggtgtcaggagaggacagaaaaaatgagacaaaaatgaggaaggaagggctagaacacatcagagggtgctttttcttttctttctcttagtaaagtagctcaaaacagtcacctttggtgctggaagagaatttgtttctgctgagttcttcctatgagagtagatgaagggcatgggtatcaatgtgagcagtgtgggcaaaagctgcgcccctgtcttctcaagagagtgggagagagggagcggtggaggagttgaaggcaccaatctgagggcgccactgccaccgggtggccctgaacaaaaactgcattgaaattaaaaagtctggccgggcacggtggctcacgcctgtaattccagcactttgggaggcccaggcaggcagatcatgaggtcagaagttcaagaccagcctgaccaatcggcaaaaccccctctctactaaaaaacaaaaattagctgggcgtggtggcgtgcgcctgtaatcccagctactcaggaggctgaggcaggagaactgcttgaaccaggaggcrgaggttgcagtgagctgaggtcgtgccacygcactccagcctgggcgacagaaagagactccatctcaaaaaaaaaagaaagaaagaaagaaagaaattaaaaagcctgaactccttcaaggatgggaaatgcaaacatgaatgatgaaggggcaatgttgtttgtgaagaaggcacacagacaacaccaaagtgaagagagggcaacaattccccaagtcacagaaaataaaactaagaaacaggccaggtgccgtggctcatgcctgtaatcctggtagtatgggaggctgaagcaggtggatcacctaagcccaggagtttgagaccagcctgggcaatacagtgacatgccatctctaccaaaatacaaaaattagccaggcatggtggcacacgcttgctgtcctacctgagaggctcaattgagcacagcaggttgaggctacagtaagcagaatgacaccccgtttccaaaaataaataaataaaaaaaagtagaaataaaaagctccaagcctgagcatgcatttaaataacaagagccacatccacactagtaagaaagagaccaacaaacttcacaagggaagtgtttatcctacctcaagagtttgagcacatgtcctctgaacccaaggcagcccctgatccacagagaataggagagacagtgccttaggtccagtgggagcaggtacgggctgctatgctggggagtctaggacaacatgagaactagtgcagctgggaggcaggcaggcagtggggctctgcctggcaccgatccacaggtcaccaaaggctttccaagtcctcacttctgccctggaagcagatggctgcgacagccaggtgtgcagaagcccgctgaggcctacaatgagcacatcagcacctcatgatggctstgaccctgagaacagaagcaacccatggccttggggagaagatgctgggaatttttatgatcatttatctacagtcttaaagaatttaaaaaagaagatgagtctctaatcccagcactctgagagtccgaggcaggtggatcacttaagcccaggggttccagaccagcctgtgcaacatggcaaaacccatctctttaaaaaaaaaaaaaaaaaagaaaaaaaaaaagaaaataaacgaggcaaaattagctgggcatggtggtgcaagcctgtagtcctagatactcgggaggctgaggtgggaggatcgcttgaacctggaaggcagaggctgccgtgagctatgactgtgccactacactccagcctgggtgacagaacgagaccctgtctccaataattaaaacaaaaaaaatagaaaagatgatgatgatagtactaaatattgactttattctccaaaatttttaacccaatcttattattcaaagaaagtcattttttaaacttaggtatttttccttttttaaaaaaattaagtttacacatctatgctgtaacctcccctcccygcccacacgtgtacttcacactgtgcaccacccaggctctcaacttgaaggaagtgacccaggacccccaatcagaattgtggccatgtggaaacaaccactctgcagctagaaggctcttacggctctggtggagggatgtccacagtgcagatgtcctcagctcacgactgtgacagcgacttctcggcaagagtgccccccacccccaacccacttgagacaggtgtgttttgtagaagagactgggccatgcacagcacacacccggtcttccagccaaaagcaaatgagtgctggtggagggggcttgcagtggaacacccactctgctttaattgaataaccccaacttaaaatgtatgcactaggctgactttaggcacttttctaaagcaacatggcattatcccaaggaaagtgacagaaaaaaaaactctgccaaggcccacagaagtctgctcccacgaggacctcagcctgctctgctgagggtggctgcgccctcccaagsctcacctggagcttgcgggccatggccaccacctcatggtcaggagggttgtacttatagcagttggagaacatcaatcggacgtcagcaccaaactcctgagcatcacggtactcacgggcctccagtttagactggaaaacaagacaagtccctgttagctgtgtctgcccatgtgaccatggagaagtggctggcagcagacgaaagggatgcctagaagagcaagttggtttcttggctctcagtttggtcaagactctagtggggggacaggccatcaccccagttctcagcctcagggctgggactggccctgccaacatcccagctcacctgcctggctcgcaggcaggtggactcagaacccacaggaggcggagcctgagccagaaatgacggggagaactgatggagagggctgggcccagctcatcgtgatgacacagtacaggagctggtcaaagggacacagcactgttccctgctctgcctgccccatgcttgggactccactcccagaagaagaaacacgtaacaagtcttaaaactaaaaaagcctcaaaacactatggtgaaaatgtcggcacttacagcgtgcctccaacacagaggagacagcaaggccttctccaccacaaagaggctggcaaggccgccaagccccaactcccatggagcatctactgtgtgggcaaggtacctggggcactgggcccccaaggccagagggcttgtcttgcttttcctcagactaggggaaggggcagcacaggcatctgtagccacaatggccaagcaccaggtctcagagcacgtcccacagcagacagcagggggcgctgagtttcttcgagttggcgggaaaaatccacgcagccaccgttccagggcctgggcttcctcttggactaaaaggtctaggaaggttctgatgtggagggacagcctgcccaccttgtcccttccctcaggcacatcccgctaaccttgattgtgctcatgtccatggggtgcttgatgatgtcacagtagtcgtgtaggcccagtgcctccacgtccacaggcttgtagaagggccaggcgtaggcggcgtgcttcttggcaaacatctccttgaggatgccgctgcagcacttgagctgctccgagaccttgctgctcttctctggtgctgggtgctgctgagagtcgggcacgtccttctttggaggtttcacaggccggctgctctcccgccgctggcccagcttggtggtcttgggctccgggggcagcgagggtggctcgtgaatggggtcaatggtggtgggggtggtggtgtctgctttcctcttcactcccttctttgtctgccaagaacacggacgccaacaggcacagtcagaagtggcagccggcacagctgccctcagggtcacccccaaagccaggccctgtcttggggcccatcgctcacacagaatggacccaaagataattgcacaggcaaagggccaaggacaggcagatcgtgtcccaccactctgctctgcagctgggacaggacctgcctgtggcaggagaaagcataaaactgtgtgctcacttggaagccaagggacctctggaggctgcttagtacctaacaccagggcctctccccaagtgcccaggggaggcacaattcagagactatttagatggcccatctgcaaatatgcacagtctaaataaaagaggtgcagggggcaggaacccactaggaggtgtgacacaattatgggacctttgagtcagtggggcggctgtttctgggctgcaatttcaacacagcaagatctccccagaaacacccaccagtgcccgggacccaggacaggctctgtgtaaagcacgggcaaggacagggccgctctcctccctggtgaagcagccctccagagtccaggagactcaccttcacaggctgtggggtggccgcgatgatgggtgggtggctctgtacgggctggggagctggagcgggtgggggttgtggctgggggggcactggcgggggcgtctgcagtggctggggaggcaccactgtcatgacaggggtctggacgatgaggtccggggtgacggcagggaaggggtgaggcgtggcctgcacaggaggaggattcggctgaggggtctgggtctgcggaggagtcgatgcttgagttgtgtttggtaccgtggaaacgccaggttttgctgtccctacaaatcataataagacggcgagttagagaccatgctgacatccacatgctggctgacctcgtggggacatacaccacacacagtgaacgcacattcgcgtgttgcatttgcctgagagacgaacatcccagactccactctgccaaacccttccacctgtccctggggctcaaagaacagcagaaaaccgcacttcccatttcctagggcgtcctggctgcaactcccaactcaggcacaaagaccccttcatgaagcctggaggcccaggctcaaggagcaggaagcacatgctgacaggggacagagagcgggaaaacactcctcagagcttccaggcacagctgcccttgttcccagaagcactgccttctgagtaagagcttctggcagggagccggcagtagccgcycttgccaaggtttctggaaactggcaggcccccacctcctggaaccacagggggcagctggactgctgcccttcatgactggctcgagcgctgcctcccagcagctgtgcaggcagtccgaacacacaatggtcacgtggcacacccaaccagctgcaaaaagtgaggggttatggccagagctctaacaaaactgggtggaccagggtgagaatgtctaggagcataacctgggtcaccacatccttcgtgtgcatgctggctgccatgaaaatggacaaagacacccagtgccttcatctatcagctcaagcagcacccatgttccctgtgcatctcaaggagcaagggtgagattctgctgagtttcccaattctccttcctcaggcacaactcctgggcttctcccagactggaataggagatgccaccacgtctgtctgcccagcgtgcagcccaaacccctggtcccagggagtgaggaccaatatcctcatgtaaggataagggatgtgacttacatgaggatcaggaatgtgatctgataggtacaagagccacagggtgacacgtgagactagttctccttggttacctttgggtgcagcaggggatgtagcaaccccctttctgccaccacttcagaacagcatgggaggccaggtgaaaggctgctgctcagagaagcaaacaactcacactcagggaccacctcgcaaatgtcacccttctgcagcatggagttgcaaaggacaagatgtagccagtagctgctggagagtttcctagacagaatcatttcctagagtgggcagctctgccagctggcccctggaaccctgtgtcagttgggggtggtgacaggcagagatggatgaggagggctttcacttcagatgactgagcatcagaagcagggataactctgacaccagtgcattaaggtaattccaatcacaaacctcaaagtttagaactgagatgttagttaaaatgatttctggtcatgttaatgtccttaaaatggaaaagtaaaaaccacctatgatactggcagggtgaagtgttcaacaaacgtcaaagtgctttgagaagttacactttccttttaccctaagtccatcacctaccctcagaaaaggcagggcccaattatttctgcttagaagaggccacagggccacatgaccctatgggatggatccaacaccaaacccaatctcacatgtccaaacaccaacacggcatgcagtatataatgtcacatcctcctgccactcccagccccccaccaaacttggaaaagggacaaaggtcggggagaaagccaatttacttgctatttcagtactctacctgtttctttcctcccacgtcctcttccttttgcctggactatcatgatctcggtttcttctgtgggtagctcatttattttttgcaagaagagcttttccagagcttctgccattaagactatgtcatctccaggctggataaggagacacaggggtagagtcagagggccctcccctccccacctctgtagacagggcaccccatgccaccccctgcccccaaaacatgaagcgtcgtattccgggtccttccccgatctgcacccaaaggagccacaatggctacactaccaggtatcacagaggcttgtgttcccacaggtgtgctgagcctacacttgtctacctgcacctccctcatcttttaagctctggcctatctgagaagccatcctaatgccttaagcatctaccaagctcagccaatcactgaaaggggccctcctttgacacaattcaatttcaccagaaatacgtgaatgacacaggatttcttgccatgatacattagcagggccccagcaatgctccccaacgtacccccatggcagctcaccaggactctgggcactgcacatctcacactagttgaggggtcccactctgtcacctcatctataacatgctgttcccactcagttctaaactgagagcctggtctgcacattttgctcaaacctaagtggtgagagctgagactttaaaaaacacagtaaacttcaagaaactcacctacccatctcttctgggcatttttacccactacaccagcagaggtcaaaagctgagttctgtatagtgtctccctccagagtcgttctatttgaaagggttgattttaatcacatctgtggtctgaactgtaaacaaatgatctggcttcatggcacagccgagccgaaaggtttggctacggggttaggaagtgaccttcaggtctacatgtaggatcggggggacacttcatctatggccaagagttattgacagtcatgtccacagttccagcagaccatcacccacagagcaactgagctctgcgccggccccatcacaccctctctcacgtggaggtctctgtttgggcacacctctgcacaactacattttagcaggctctttcctaacaatttacatcacccaaatggactttgtcatgagtcgccactattctcctcacaccttctctactagacatgctcaggaaccaaaatcccaagggcaccagaagcacatgcttcaggctaacaaggacagcttgcaagttcaacatggccagcaccctcctcccagcaaaaaagcccacacccagtcacaggaacaaccacaggtctcattacctctacctccaagggtctcctcttgccagactccaagcccagccacacccaacacccctgcccacgggctcctgacatgcccactgccgtcgcctcccctcctctctccccagggcagctggacacccacccctacatctcaccttgttgtagatgtaacaatttgtaaacatagtgttgaagtcctggatacattcctgagcattccagtaatagttgttttccaagcgcttctttattgttcccatatccataggcgttttaatgatcttatagtaatcctggagagcagagagcaaaagtccagtgtcacctaggcagccaggcagcacaaacgctgggctggccaggctggcctggggacctcacccctggctgctccacaggtaaatccacgggagccacagctcctactggcatcagcaagtgatcttgagggggaacaccaaaataaagtggagcggggaagggttcctggatgctggggagtaattcagagggaaacgtacaagtttccaaccactctatcttgaaataggctgccttcattgaaatgcacattttttctttttatggatactaaaatattctttcacttttaataaataagggggaaaccaggcagccttttaaaaagcaatcctcacctagtaagacaacccatggcaggtcctacttgtcccatttgaaattttacatgtccataaaatgcaaattcccctggcgccaatgctggagtccacttgtaacccttgaccctggcactcctgcctccttgtcaccatgaagagctgcggagcataagtttccacccctagtcaaattcactggacttaacgtttctttcatttgcacacagtctaccactaaggattctttagtatccagatactgctgactgaccaggttaactgccaaatgacaaatctggacagccttcacaatccttagtttaaaaaaataaaaataaaaaatccaccatcccaaccctcaaactttcagatcttactaagtgccaaacagaaggagccagataacagatgtaaacgtcttaaagtgcccgaaatcaaaccacgttattctcacaacttcttctctaaatctaaacctattctaaaactaagttcatttttaaaaacaaccacagaaggaatgtgcggacagatcaagcagtgcctgggtttccaggtgtgaggatcacagagggccaggcagggggctgcacccagacagcaagtccccaatgactagaccagctcaggctgttggcctgacccaccgatagccaaactttctgagycatcactctgactgaggacaggtgctcctgtaattaagttcaagtggtgtatcagaaccaaatccaagtggagtcccacggtagaggcacaggctgcaggtggagaggctgttgcagggagaagagagcaggtatactaacagcaagcactgaggccctgctcgggatggtagtggacagcgttggaaaggccagcacagggtatgggtgtggggtttttgagatgttctgacatccacgagaaagagtcaagggccacctgcttacatgtaaggttttggcacagctcatggaactgccctgggggtgagggctacaagtgcacacccaggcaccttaggcaagtggtcaagaggggagactggaagcagactatcggtgccactttctatgctctgacctcctttcccaagagaaccaagtctgaatagatctatcccagtggaaatttaaattttattctatggccaaaggccactgaattggccacagtgtgtcacatgtctcaatggccaacagaatagtgaagaggaattggggtgaaggcagagagaacggtgggggaagaggaactgccagcctggatagtacggtttggggccatgataggagatcaaaatgcgggtgaagacctagaaggcatcagaaaacagacaaggaatactttttagggtggccttattaacatctcctgaagaaggaagtccccagaatacagatttagcatgatgatgctcctgatcaagcatcccctttggctcagcccccaccaaatgccctgagaccactctcactcagcaagctccttcctcagctcctcactctcccatctctgaagacatcagatcagggccaccatggatcagtcccttcttcttatgtcagagctaatgagggcgacgtcaacagtcatagggacaggtagattcacactctgcctggaccaagaacgtcctggccactctccagcctgcacttcagagactgaccttgaactcccaaaccccatggcctaaccaatcacccatacttgtctgtcccgctggccagcactgttccctcaacctcaactgggatgctgctgcttctcggcaatctcaagtcccccagcccttccttctcctgtcttcaccttctcagccctccctgcttcagttcccactgcgttttcttgtaacaagctgacccctctgctattctggcactgatgcgtttcccttcaaagccaagcttcttgaaatggtggcttcacrtcctcaccttctcattcacaccgtcgcaatctggtttctacttctgtgtcacgtctwcctaaggtcaccaatgccctcctaaaggtcaacaggatgatcaggtcggaatcctcatctctttgacctccctgtagcttctgatgttggaatctggggaaatgctctcttctgtaggccttctgccttccctccaacccctaagggcctcacaacgctctgggttccactccagtccccagttccttctctcctggttctgtgcatctgctctgagaatttcactctcaactatggaccctgtccagcccagctagagattggtgcagtgagctcccccaacagtctccctcccgcaggccaacacagctgactgcctccactcctcatcttggtcaatggagagcgtggcgcctcttctgcctccatacctttcctgagccatttcaagacccagacacgtactgcmctgttctgattatcttcccccgagtgcttgacacgtattcagtgaagcaatagcaccagacagttcttacagacacaatgactttaaacttgggagtaaggatgcctggcagaggctaaggccgctcckacacaccagtggctctggtgtgcacacaccagtggctctggtgtgcacacaccagtctgggtcagtggctgcaaccacctaatgcacttgccagggggtgtacaggacttggcaaacagcaaaggacaatttaaagacaattagtctttggtgctttaaagaaaaaaaaactgaagcatttattccatctgctccctgaggttcagctggagatacaggtttgcttgcagaacagtttgctagggacatgggcatatggaaaactctccagggaaagagaagaggggcgggctcacaaaagcacaagagcaagtgtgctgtagccagagggagggagggcaacaccacctgtgcagctgcagccacagccacctttctccaactggggacgcctccatgtacttgcactccctgcgaggtaatcccactatctttccccaccgtgtgctccgggtgacagtgacgatgatgctaggtgaccactactgcagcaagccaattcccctctagcatagtttgatcaactacgtctacttatccttgatcaactatgtccacacctgagaaatgaaggggctaggatggccaagtgctctgacttcaactcaccatggaactggaagtagatctgtgggccttcctttctcccactgcttcaacctctacacaattttccccaggattccaatatctaagaaaccagttattgttaagccaattagctcattctttctccctgatttcaactgatcagaactgctgaaaccactcactcaagggccctgcagctctcacyatgattccaaatgcatctcctaccctccccccaggaactgccctgaccaggagacatgcaggagamgacctccaggacggccaccctgggccctgcccacactactcacagggaggttcagcttgacggcatccacaggctgctggaaaggccatgcaaactggtgtttccatagtgtcttgagcaccactctgagcaggtattgcagttggttggtctgcctcttgggcttgttagggttggaggtctctgggggcggggggttggtgctggctgcgttggctggctggggttgggcctgggcctgtgttgtagacatttgggaagtttctagtccatcccccattactggcagatttctcaatctcgtcccagggccgctctccgcagacatgctagtgatcccatcacattcttcaccaggcactctacaaaggawgagaagagcccccgtgagatatcagtcagcagatgggcaccgctcagaatgacaagtccctctggctgtggtctccaaggactgagttccctggcggtagctwgccaagttggccagagggaccaccccatgctttgactgaaagggttccaatgtctcctctccccaaagacttaccctccagcagggaggagaccacaaaccaacagaggaggcagagtgaggtggtgagagcccactaggagccagcaaaggctctgggaactatgaaggtcatggggaaggatgtacaatgaagccacgtctcacaaacctgcacatcccttttcccacctgtgagtttttaggagatgctgcctgtgtgtggaaggggatgatgtgcaggctcccacatatgacatttacattaaaactccttgcatttatcacacacaaagcatcgagcaaagtcaatcatttcatttggtgggccaggcaaggagaagcaggaaggctgggtctgcccacccatggatggcccacccagtccactgccaagtgctcagggcaaagccacaaacctactaagaatattttcttggtaacttaaataatgcaggtctgctgaggaaagaatctgcatgtttactgccgataaaataaaaatgaatccatactagacctaccattttcttttttttttttttttttcatctctagtaataaacctaagaactcagtggagatatcattctgggatgaacttttagtgggttcagaagcagctttatgcctagcacacactaggcaccctagctgccagtgaattactttgtgtaatttatttaaaccaggattacacaaactttttttgtaaatgcagttctggcaaataatcctattttaaaagctccaaacggagaatttgctacataaagcaactccatggactaggctgtggagataggaggccagtgagataggagaagacacagggacaaatgacacaagccacatatcagcttgctgggaaccttgggtccagtgtaccagtcttggtccagacacagatagattacaggacacaccaagtgactggacacaagtattggtagaaggacagcatcacagacaaggaawcaagtcagtggggtttaaaccccactcacatgtggagtaggctggagagggcttccatgcagcaggaccagcaagtccaaagtgaccaatggggacaagtgtgatggggtcaaggggaggggaggcctaaaggcactgtggaagcctggatcccaagatggagggtacaaagagtgaggccaaggaatgccattcagtttggtttctatgattagatttctcctagaaagcagctccagaaacatatagctgatgctgcgcaccaagcacacgccaggtaagtgatggcaggcaggggcaggagcagcccagccacaaggacacaggcggccagggtgcagagccaagctgtcccaaaaggaagcagaccctataaattttcyattaagtaatgacattctggaaatctctaagcaatgcccttgaggcaagatgaggccaaggacttctagaacttctgggctgggccatgcttgtctctttccaaaaagacttgcagcaaagccaagggacaaaaactcatgtgtgctctaggccagtgaccactcttcttcaccttctcaccaggcctagataggcccttgagccgaggaagctgaattttcctttttttttttttttggagacagggtctgtcgcccaggcagtgcagtggtgcaatcttggctcactgcaamctctgccttccagggtcaagtgattctcccacctcagcctccccagtagctaggattacaggcgtgtgccaccatggctggctaatatttgtatttttagtggagatggggtttcaccatgttggccaggctggtctcaaactcctgacctcaggtgatccacctgcctcggcctcccaaattgctggggttacaggcgtgagccaccatgcccggacagaagctgaattttctgttcacaagaggaaaaaaacagttttctacagaaaacctgactcttgaaccttgcctcatttggtgttttaagccattgcaaaagccaaaacacccctccctagccagccagctcacaagtgatgcacagtaacagttaaatcctcaaaaatgctaacattgcttctggcctcatccccactttacagatagggaaaccaaggcagagagaagtacctgacccaggagtggaaacaccaggtctaagcagatagagtggcccaaaacctggcatctgattcctgggcagttaagttggcctttgaattaaggaagtcctcattagtgagctgcacacacacacatcagaagtgtccaacacagatggtcgtgacacagtggccatccttaacacacacacacccaggcccctgaggaaagaaactgctggaggttgtctgttcaaatgtgaaggtatgacatgttcgacacataagacaaacctggtagctaccagtaccccaaagtttctttaaggaggctctgaagataaccaatgaaagtgacatctggccgggcacggtggctcacgtctgtaatcccagcacttcgggaggccaagaagggtgggtcacttgaggtcaggaattggagatgagcctggacaacatgatggaaccccatctctactaaaaagacaaaaaattagccgggcatggtggccagctactcgggaggccgaggccggagaactgccttgaacctgggaggcggaaactgcagtgagccatgattgtgccactgtactccagcctgggcaacaagagtaaaactccatctcaaaaaaagaaaaagaaaagaaaagaaagtgatatccatggccccacaagggagatcaccataagatacctgggactcctgcacccactctgggcctgtgcagcacctgcacctcaagggaccacactgacctactgctatgcccacagccttcccatgactacaggaaagtaagacccttgggaaacttcaagagcccactcttactgcaatgacaagaaacatgaggaaaaccaaccacttctagtctgttatggggcaagaaagagaggtacagtgagaagtcctatgtgagacccagatgacttttctaaggcccagatttgatatgaggtcagcctccttgggcgaattcttcccacagcggttccccccaaccccacactgccccaggcccctagcatctaggctctaacaacaagtcagccaaccctgtcaccttcagcctttgatctgctagccctactgccagacagatggatggatgcagacataggctcacagactctctctctctctctctctggcccatagcatctggtgcttccctcatctccatctactgagttccatggtcagccccctaggaacctgaaggcaggctcatctttatttcacttttatcttcccagcacacaggaggtgaacccttagtgaccatacccacattgtcatcctggggcttccagctcaatctcaaagctctggaaaagcaaaacagttcacactctcacatggataatgtggagaccaccagactcagtcactcgctcaggcaacaggtcctaacatgccttgccctaggactcagcggttgacatggcattctcccgagtgattaggcaatacatggggtgaatactgtggaggagaagggcagggctgctctggccatggacggggagagggatctgcactgacccgagggacaggcggcatctctgaagaagggacagagaatgagaccagaggcgggggaagagtgtgtgcgcttctgtggtgggggtcaggcaggcagtggcaagagaaggcatgcctggcatagataacaggagacaacatcttcaaagttttccgttgaaaagattaaaaactgctgctccctctccattttcatactgacytgtggccaaaaagcaggagccaccattcaccacgttaagagttagctgaaggtcaaggaaaaggaaaagaatttcgcttattgtttccaatccaaaggcggctacataatcgaacttgatgtcctacttttgtatctacttccaacagaaaccctatatcatgttcccagtgtagaagaaaaggatgaagcaaggttagacaatgctgtagttcccaaactgagtgcccaggtgccttggggatgtcatggtaaactcagatggcattgcaggaactatcagcacaaggcaattgatcatttcaacaccagattgcactatattcaacagtgtcacagcctgcaacacttgatcagcaagttgctgtaataaaacaaagattgtccaggcacagtggctcacgcctgtaatcccagcactttgggaggccatggcaggtggatcaccttaagtctggaatttgagaccagcctggccaacacagtgcaaccctatctctaccaaaaaaaaaaaaaaaaaaaaagtacccaggcatggtggtgtacacctgtggtcccagctactcaggaggctgaggcaggagaattacttaaacccaggaggtggaggttgcagtgagcagagatggcgccactatactccagcctgggcaacacagcaagactccgtctccaaaacaaaacaaaacaaaacaaaaagcaaaggtcatataaaaatcaacatgaacacctgtaatcccagcactttgggaggccgaggcaggcggatcacgaggtcaggagaccgagaccatcctggctaacacagtgaaaccccatctctactaaaaatacaaaaaattagccaggcatggcagcgggcgcctgtagtcccagctacttgggaggctgaggcaggagcatggtgtgaacctgggaggtggagcctgcagtgagccaagatagcacaactgcattccagcctgggagacagagcaagactccgtctcaaaaaaaaaaaaaaaaaaaaaaaaaaaaaatcaaaatcaacatcaacaggagatgcaggtagtgacatccaacctggttctaaggtttgaggatttgtgcagcatccaacaggcagacacatcctattagaaagtaactatgggccaggcatggcgggccacacctgtaatcccagcactctgggaaaacgaggtaggcagatcacttgaggtcaggagttgcagaccagcctgccaatctggtgaaaccccatctctactaaaaatacagaaaaatcagccaggtatggtggcgcatgcttgtaatccagctactccagaggctgagacaggagaatcacttgaacccgggaggtggaggttgcagtgagcagagattgtgccactgtactccagcctgggcaacaaagcaagactctgcccaacccccgccaaaaaaaaaaaaaaaaaaaaagaaataactatggttatgtaagaataaaatatatattcctgtttttttttttcagacagctacacagttgttgagacattggtacttattctgctgcttgtgcttaaccacctaataaacaatattgttggctacttcctctggcctgaggcatcacagaaaaaactgagacgtttaaggatgttgtgaaccaagaaaatttgggaacttctgggttaatgaaaataaaaatgtaaattttccctctaaattcatagacctctgattaagcatgcctgttttcttttcttttttgagacggagttttgctcttgttgcccaggctggagtgcaatagcgtgatctcgactcactgtaacctccgcctcccaggttccagcaattctccggcctcagcctcctgagtagctggtattacaagcatgcgcctgcacgcctggctaattttgtatttttagtagagatggggtttctccatgttggtcaggctggtctcaaactcccaacatcagatgatccgcccacttcggccgcccaaagtgctgggattacaggcgtgagccaccgcacccggctaagcatgcctgttttcaaagatgttctttgcaatcataatatttaagtgaattttgggaaaatattagggatagacagtacttaacagagaacacaactgtaatgttttataactctgaacaggaaacaaactgtttccttggactaactttatttacaatctagtcaatagttcagacaaattagaaatctaacaaaagatatagaaaacaaaaaatccaaaaccagctcagaaagtttgaacactttctgcaatgatggagtccctacttgcaaagtggatggcagcaagccctcttcactggtatcctccatcaagtcatagttctctccatcgcccgtcccaattagctcctatccttcaaaggggctttcagggtctccagacaggctttgttctgaacccactcatcacaaagcagtctggccccaagcaacctgttcccagaccaggaaaggagattagaaagcaggatatagatagatacagacatgcagggcaggcttagttctgggactctaaaggcaagccagagaggaaaagagaaagaccacaaacaactgcccagaatctgctgattgctggagattcagttcccagttccgtccatcacaagtcactgagaaaaccaatgggttgggaccagctatactttgtatttgcagttctacctgaagtcctggcctcccagcggacctcttgaaacccagkaatcctgccttcattctgtctggtctgttcagactcacccctctcctaaagtgatggagcacacaggtagaaagacgccagggaaggcagaagcagtcgccaagacgatggctggttaaaccacacttagcagagctttatgcaagccatcatcacacagacctgcaccagggcctagaagagctccacaggaggtacctgccacttcttgagctgatgctgttatcgagcacttcatctgtattggcttagttatccacacaacaaccctaaaaagcaggctgcgactttatcatcttcatcatcatccccatggggacagaggcagagtggatggtggcctggttggctggacgtcatttggaacagtgtgtgcttcaagtcctctgctccacagctgtctccactcaccaagcacagtggcaacacccacaaggggcagaggcccagtcatcctacacgggtctttggcttggccagcagcaccacactttgctgtacccatcagtggcctgccttctctgcagaagcagctgggtgccatgtggcccataagctgggtcttaagtcagacttctagcagtagtattccaaagaatttcatcctcgtaaacaaatcagagccaagacctctccctgcagcacctggccatctgcttacaatgagatatatcccgtgtcataggtgaaatctaaaacataccactgtgctgaagtcatgaggtgtgggggcaaggggaagggacaccaagttgttatttatgcttcccaagcagtaagatgcctgaggggacatggcttaaatttgttttattccatacagactgccagccaatgccaactgactacagcccctcatgaaatcacaagttcacagtcacacatacccttcaggtagaggaggtcacctctccaccgctccaaggctcttgaataaacaattattttcagggaatgctagattctgcccagggacaaaaacaagaggatgagggaccctgactggtaaaaacctggtaatttctcaatacaattcaatttacagcaatttacatcttatcttgtcctagaaacatctttgctgaaatgctgattacacaacatcaatatcagaaggtctgttcccctcctaggtgctagagtggcatctacttcaaattcctgacagcggcttctttaattgtgcaatctgtgtcagtggggaagcacaaataggattacttttccatctgactggctcaggcagctggtgagaacagcgctcgtgtcatcagccagactgcgccgcctggagccgggccagtggccgtgcgccgaggcagctcttagaggccttaatcctccttcacgcagtgtgtatacaccctgccccccaccccttggaccagccaagtggtggggccccattacctcttgactctgcagtaccccagaccctgcaacttgccttggattagacaagccaaggcagagatatactggccttgctgctaggggagagtgtgagccacactcaagctctctgttccccactggaggggacacaggcacacaaggatcttgcagtcaggaggccaggaaactgggcgggacacaatctcaccaaccagaattccagtctctctgcttttgaaactcatcagcaggctaattaaactagtagcactgaaaatgctgcagcatcttttcactgcaaaagctgccagcaactggagggacaagtggctcaggtacagtgaaaggatccattgttacatgtgggttacatcatgttgctgattgttaaatctgggcggatggattcatgaaatgtaaaatgttcctgtgagaagcatgtagcaaaaacaaaactttgacatggacaagatcaaaactgttgggttggccaggcatggtggcttacgtctataatctcaacactttgggaggccgaggcgggtggattgcctgagttcaggagttcaagaccaccatgggcaacacagtgaaaccctatctctactaatatacaaaaaattagccaggcatggcggcgtgcacctgtagtcccagctactcaggaggctgaggcaggataattgcttgaacttgggaggcagaggttgcagtgagccgagattgtgccactgcactccagcctgggcaacagagcgagactccatctccaaaacaaacaaacaaacaaacaaacaaaaactgttgggttaaaatgtattccagcaggggcaggctaggctaacttttcctgtaaagggccagagagcaaatattgtcagctgtgcaggacaaacagcctgttaaaatattccattctgccatcatcataaaatgaaagcagccacaaataatcctgaaacaaatgagcctcactgtgtgccaaaaaaactgactggcctgcaggccatagtttgcagcccattccatagatttctagactttgtgaaggtaagagaatgtgatgttacatcagaaatgcaggatgcaaaattacagatgaaattaggtaacaatgccaggtgggtgggcacaaagacccacagaatgaagccagaggtggtggcaggtgtgtggatgacaacacctacttacactgaaaaccaaccaaccactcggccacacatgtaaaaactactcagcctctatgcaatctatcccctttgacaagcccatactggcctcttggtgtctgtccacttctacctggtaagttggcccttcaggcactacacctggccaaattacaggctgaaagattatgatagaaatgtcattaattcaagctatgcattcccactgactcagctgtgcccttcacagttaagagtggcattttctccttgttgactcctttaaagccatttccccatctcctttacctgtcttcactttacaccttttcagctattcatctttttcaacagagctgtggggtatgtggcactgagattcatccacaccataatatgaaacacagctggaagtgctgacacacacagtcccagctcttaggaggctcaggtgggagcattgcttgagctcagcaaggctacagcagttaagctatgatcatgtcactgcactccagcctaggcgacagagtaagactctgtctttaaaaataataataaattaaataattaaattatgaaacgcaatgtgacatgactgtgaatttatggattaaaaccctgctttgagagagactccaagatggccagggagcaatgcagatcacaaagtaggggctggcagtgagctgggcactttgctctgcttaagaggggtgtttcctaggaggaaggaaatacgggggacacacttggagaatgaaagactacaaagacagcaagagtgggagaggaagttcacttcttagagggcacgaagaattaaaatgagaagaaagtttaagagtgaaagacaggtttagttaaactcagctgataatacactcctgggctgcccctggtgtcaatcagaaaatttctccggatgacatcacaccggtcttctgaaattttcccattgcaaacaaaagcataaaaactaagcttataatcctcatttaaatttaaaactataaaaatttcctatataccaaacaccagggaaacatgttatgacagcttctatgtgagtggtcaagatcacgccctttgggaatttgggaagccaagagagagatgagtgaaatgcaaacaacaatctgcatggttcatgaccacaatgcctgtggctgaaatgttccaaaacacaccagcttaacacacagtcctgttatgtgtaagtggaaacaacactgaactcttgaaacagatccacgagtgggaatggtgacattccaatcaactgctctaatttcacccactgggaagccgcccgggtgagtaagcaagagtgtatcacgcctcttaagtttcttctcaaagcagcagagcagcggctgactcaaggtgtccctggaacctgcccacactcactggggacacaaaagggaacagggctggcacaagtgctttcagagacaccatgacccaacacccccaccagcaacattttagccatgactagcaagagcccttgctgggtgggaaagccaaactagacctttgatgggcacgaggagagatggagccaggaacagacacatgcatgaaaggcaatagcacacaatgactcagggtccagaggtatcaaagcctgggtatctcgatgaagagctgacgttaatgggatgatcttttcttcaatgatattaccctgggcacttcattgtgattttaagagaaagatctggaaaaaacgttacacctgtcagtatctagacacgctcaagaaatggcttcagacaagaagacttttcttctcatcttgccctcaccactcattaggtacagaatccaatctatggggatcaggaggaggaacggcatcacttttcttgaagaaaagggaacgcagaatgtgacactaaattaacgtcagagcttccagcttccaaagaccccaagtccctggctgacaaagcaggaactgaagactgacccaagacccaaagatgaccagtcagtgagagctgacagtgtctcaagtgctggatttatatctgatacacacccccaagggtacacaaaaggccattcttacaactttacagaagcctttgatggtcaatgccgtcctaggtaaacaggccaaggggtccccaccttccaggcaacattaacttcactttcaagcttctcttccctcaggtaaaagcaagccacccagataacccattccatgcactgctgggaggccctccacacacattcagtgtctacttctgtccagacaactgaactgaatctgctggagagggatgcttggaagtaaatagctgtcaccctctcatctcagtaactttcagaatataaaggagcagaataaaatgaaacccacaccacttcagacgacaacagctaaggaagcaaaaaacttggcaggcataatcactttgtgagaaccatgttcttgtttgcccctaattccacctaacttccacaaagtaaataacccacagaagtcaagcagcccaactcttacactgacaggcgagtacatggaggtgctggagagaaaagacacagagcatgcctcatctcctcactgtgcacacccttcctcctctctccagcccctgcaggcagcagccactcacagagcagccctgggtgctgtgccacaagggagccttggatgcagccaagttggcatcttgcagactcaagagtccatcacacaacctaagttcactcccctgcagatgtggccagcttgtcctctgagtccactgaggagtaacagccacttaactggtaaggaattttcagaccaatagaaaccaaaacccagggcagcgactatcacactcgtatggaacctgtggcagtccctaggaacgcctcaccacctttctactaaaaatctgattaagttcaggagttcaggcccagcctgggcaacatggcaaaaccgtgtctctaccaaaaatacaaaagattagccaggcttggtggtgcacgcctgtggtcccagctactctgcccagctccagctacttgggaggccaaggagggaggatcgcttgagcctgggagacagaggttgctgtgagccgaaatcacaccactgcactccaacttgggtgacagagtgagaccccatctcaaaaaaagaaaaaaaaatctaaggatgtagaaataaggtgcatcacacataaataaagccttagactagggtctagcatacagaatgaaaaaattttaaaaagtgcacatccctgagtagaaaagagatggcaagataacataaaactttggctaatttttattactactttttacatttgtttttcccaactccctgaaataccatcaacatagttatcaatcaggaactaaagggaaaaaatactttaaggaggacttaaatggccaggggtgggtgggggcacgaagcacagcaggagagacacctggcttagttaggatggtgcccactctgagtttagtaactgctttaggaggcgtgtgtgaggagagccagagagcaacatgctggcagcatgagacccactggccttccctagctccctaagttattcccaggttctcccagatgccatgctaggcttgcctcgtccagggagggagccacctcaaggaggtgccccattaccctctcctaagtcccaataccctcccaccaattcttcccacgcctctgtcctatggacctaaggccaaaagccagacaaagggggacaaaggtctttcctcaggtatccagtaacacaaatcagtccagtcccctccaccccgagcagatgagaaaaggagcatagcccctcccctgcaccggcctaacatggaggagccaacacagtgctgcagcaagaccataatcaggcaccgtggtactcacaggctggaggccttattagcacagaagatgagaaagagacttcagcagcagagacagggaagtaatagggacatcaggtggagggcatgggagaggaaggtggctgctgcacggaggaagtgaaactccatacttgcacatctgcgcatgtccaacagaaatacaatgtggctactcatgccattttaaaatttctaggagccacattaacagagaaagcaggtatgcttacccaaaataccatttcgacatataaacgtgtaacatttttttccttactaaatctgtgaaatctaagtgtgcatgccccacagtcacagcacaattcaggtgctaaattttcacccaaaatatgtgatctgtatttagattccataaaacttgcagctgaaaaagtagattcacatacccgaggtgtccccaacatatctggatgtttttcactaactaaactgagcatcagctttgaaaattaattagaatttgattaaagtaaaaattcatttcctcggtagcactagccacattttttgatgctcaagagccacgtggggttagtgctgacctcactgtgaaaatctaagaggtttcactggctaggaggccaagggcaggcattttaggaactctgctctggggccacagggatggggaatactacacattcaggctggttagaccccagtcagtttccacacctaccacttttatcacccacagatccacctgtgctttaaatcaacctgctcaactaaaatatatctatttaaaagaaaacattaacatagcattagtattaacacatcacctgtgtgaatgggggaaacatatgggaaatctcaacacaggatacaatcattgttgagtttcctgtatgcaaaaaaatgtttatgcggttttagaggacagtgcctttattctttttttttttaagacacagtaaaaactttaataatcttatttttattatggtaaaatatatgtaacataaaacttaccactttaaccattttttactgtatagtttggtgacattaagtgcattcacgctactatgcaatcactatctagctccagaactttttaatttatgtatttattttctttaaagatggggtcttgctatgttgctcaggctggtctcaaactcctgggctcaagcaatattcctgcctcagtctcccaaagtgctgggactacagatgagccaccacaactgggcgtttcagaacgctttcaccttgtaaaacaaactctgtaacccatatatccactaaacactaactcccaatccctgcctctggcaaccaccattctactttctgtctctgtggaagtgactcctataggtacccagcgtgagtgaaaccacaaagtatttgtctttttgtggttgtcgtatttcacttggcataacgtcttctaggttcatccacattgtagcacctctgaatttcttttttttttttgagacagtctccctttgtcgcccaagctggagtgcagtggtacgatctaggctcattgcaacctccacctcctgggttcggcgattcttgtgcctcagcctcccgagtagctgggactacagacacgtgccaccacgtctggctaatttctgtatttttagtagggactgggtttcaccaacttggtcaggctgatctcaaactcctgacttagatgatctgcccacctcggcctcccaaagtgctgggattacaggtgtgagccactgtacctggcctgaatttcattccttcttaaggctgattaatacttcatattttgcctatctatccatccatcaatggacacaggttgcttctataataccttttggctactgtgtatagggctgctatgaacatgggcgtacaaatacatgtttcagtccctgctttcaaagagaatgcccttaagaaatgtttgctgaagtacacagaggtaatatcacatctgcaacttattaaaaggatttatgggtggctgggaaggatcgcttgaagccaggagtttcaggctgcagtgagctatgatctgccctccagactggtgacagagcaagaccacatctcaaaaaataataaataaaaataaatagaagaagaggagtgaaacacaggatccagttataaacttggacaatcacccatcaaaaatcagctccttcccagaagatgtttataaggcacaggcagaattcatccggaactgcagacactgccctaagcccatccacaccctccgctggcttctcctgctggtgtgcagagcacagaacagcttcacagtcttcccttgtttttaccaaagcagccgagcagctggtgctacacaggctggtgcactgcccagcagacacacagggccgccgaagggaggaagtcaacgcccgagggtggccactaagccgtggcgggtgcctgcccctgcagatggaggagggctgagttctaagcacactactctgtgaatggcatgaatgagctctttcactggcaccagagagaacacgcaacagtaccatctgctgaggggagggaaagttcagaggagcaggcaccgactcctcaggcttccacagccaccaggtccccactgtgtcaaggcggctgttaatactcaagtcccctcctccactcctgaacatgagagttaaacaaagtcagctacagtctcttggtccataacaacctagggaaagcaaactacagaaccacgttagaaatgcttcacgtcttttacctcaaaatacctttgtttagtaaccccactccccgacacaggccccatagctctgttttctgggttctgacaactagtgccctaagccagaggccaggccctaaagagacaacctaggcaggcttgagatgtttctcccacgacctttccaaatgattccagcagaaagccagactccttagctacttaaaatcagaaaacagctgggtgcggtggctcacgcctataatcccagcactttgggaggccgaggcgggtggatcacctgaggtcaggagttcgggaccaacctgaccaacatggagaaaccccgtctctactaaaaatataaaattggccgggcatggtggcacatgtctgtaatcccagctactcaggaggctgaggcatgagaatcacttgaaccctggaggcggaggttgcgatgagccgagatcgcgccactgcactccagcctgggcaacaagagcgaaactccatcttaaaataaataaataaataaataaaataaatcagaaaatagatgggtattacttcccactcaaaaccactctcaaggtagctaggttagtgcaaaagtaattgcggttttgatccaaaaaaaaaaagaaaaaaaaaagccaaaacagcagttacttttgcaccatcctaatagatctgatgaaaccaggagaatggaagctaggaaagatgtggctcacaagcaatgggagaagtgtgcttgtaaggacactggagccccccagcctctgggttctgcccacggggcaccacccacagccaggtccctgcctgcatagacaggaaggaaaacggggccacttcacagggtgctacagggctctcagcaaggggctcaagtgagggaaggctttccaacgaagcagcctgaagggcaaggagtaattcacatttttgttttagttcttggagaggtttggtttcaaggcaggatagacacattaaaaaccatatgactgccttaggcttaagggtagggcagggggtcacacgctaggcatatgaagccctaatgacaggtgtgtgtacttctgaaacccagaaaatgaaatccctaaggacttcactgaggatccattggagattaaaaagaagctcccatcgaggcctcctcctgctcgagtgacatttaacaccaagagtaagctgactgacatgtggattattaaaagtgtattcaaagtcaatgttaaaaagttagtactagaccatttcaattctcttcaagacgcagcactgacttagaatggaatttttgatgcgcctccactaatcctgttacgttagaaaacagaaatagaatttgttcccttggcgttcactggttgccatagaaatcaaaatgcattatactttcaggtgaagaaatgcatcacgagtactgaaaaagaaaaactctcatcaaatccagtacaaactcaaaccacccctttaataataaatgggtgcaagtatacacctagaacaccacccaaacagatgtgttccagccctggggaagcaatttcattcatttcaacatacagaacaccaacccctagaaagatgctctaggcaaacagctaatctggccaggctgggactctgcctcagatggtaaagctcacaacatatacacccgcttctcatctaagcctgcagttttcatgtttccagtgtgttccatctcatacccatatgtacgaaaacctaagtgtaccccctcttccctcataaacacaggctccctcatgagttggttttgctatctctaggggatgatatacaggctattataaatttgatttcaacccaaggaaacatttgagaggttttaaaaagcgttcttcataaatgaaaaagaaaagaaaaaactctattgcattaaagacgcatatggtattttttttactggtcccagatggaaagaagtgggtatgatggcacttcagaccctgcaaaacccccaagtcaatgggttatggtaactgtgacctgaccattgcttatcacccaccaccaccaccccgatcctgttcctaacatgtgtctactgggcctgctcctgacttgttatgccctgctcctggagtaggcctataaggagatggtgttaaggtgaagaacagactgcaaatcagctcctagttgaggctagccaaacagcaggtgcctggggatgactcagtatccccatcatttgaaattttcctggtttaggtgaaaatactgggagttctgactcatcctactacatctcttgggagactgtgggctcaggagattcaacacaaagacatctgcccttgtgggttcacaggaacagatagacaatcaagaatgaaaataacaactaaaattaggagatggtaaaccctatggaaaaaagaaatgtaggtggcagatgggatggcactttaaaaattcctactccttatgactttcacaagtgaggctctgtggttcctaatctcttctcattgcctccgtattatgcactgaacaggataacagtccacccagagaatacacattctccactggaacatctcatttatgtgcaaattgctctaaagctggttcccctgatatataactattttgaacacaggggcttgtggcttacttaaaaccacagcttccatttggtgatagcatctttatactatcatctttaaagataatgaaaaacgactgaatatgcctttgagaattaatgtacatatgtaaaagagcagctcattaagcaatcccatacgacttcagtggtttgcatgctgtactactttgcctagacattgattttaagaagcttatgtatatcttcctgagtcaaacgaaggttcagtcatccttgactctacccttcaggcaggttatgatgtcagcaatccttaggtttacattcttacagccaaaaggatggtaattccttccactataccagttattttgctacgtagtgacaaaatgattccctaaataaactgtaagcagtgctgaatgatagccactcagctaatcaaagccacatttttcattttacaaatatgttccacctttaattgggaaagcaagccaaaaggagaccccctagttatcacaacatcccaccatacttaatgatcccaccctggtgttctctgtatcctggaattctcagaagttatacaactctcataggccaaaaacaaaagagcttcatttcacagccatctggaggtgccttcatgacactcaattacggctgcagactcagatgacttatctacaccccaaagggtctgcctctgctgctggaaatgctagacccagaagcccttggcactaatttggaccacacaatggactacggggaaaactacctgcctaatagggcatcgtgagcaaatgagaaaacaactgtagatgtttcgttgaaaagcctgggccgggcgcagtggctcacgcctgtaatcccaacactctgggaggccgaggcgggcggatcacgaggtcaggagatcgagaccatcttggctaacatggtgaaaccccgtctgtactaaaaatacaaaaaattagctgggcgtggtggcgggcacctgtagtcccagctactgaggaggctgaggcaggagaatggtataaacctgggaggcggagcttgcagtgagctgagatggtgccactgcactccagcctaggtgacagatcaagactccgtctcaaaaaaaaaaaaaaaaaaaaaaaaaaaaaaaaaaaaaagaaagaaagaaagaaaagaaaagcctgaaacatccccaaaccaaaagtctagttttaggtctcacaatttcggatgtgaaaggattgcagcaacagaaggagggtaactctgctcacactgctggtagttaatgtcctactctcttaactcctcttggagttaagtgcccctgaaagggtgcttcctgccagaccacaccaagtgcacacctgggtgtctccacaacagccgactactgtcgatgctaaaagttcaaggaggccaatggcagcaccactcaaaacagtgacatccaggctgaaagaaaaaaataaataaataagctcatctttaactcagaaaaagattagctgaacctcaggtgccaatataaaaaccgaagctaaaaaacaagcctgaaaccatacagtttcgcttgttaaagacactagagtggttgttttaagggctcctggctacctgagcccaaaccagaagtcctaggagggtggcactgggtagacccagcagggtggcaccgggtaaggccactggcaggcttatctcagttcccaggacaccagatcataagcagaccattaaaaggagagtagcagttaaaggtacaagacaggaagcaacagctggcaactcgatagcaggaaagcagacagctatgtcctcttgccaaaagaaaaatcagccaaaaatttaaccgccatggcagagtgtaagagctttagccgactcgtgcaggcaccactcgttagtctctagtggatatgactgatagtaaggtgtccccaagctagcgacccggaaggggtaaagcacacctatattttaaatgtttattgtaaaatacacagaacctaaaatccgccattttaaccatttttaggtgtacaattcagtggctttaagtacatttacactgttgtgctaccatcatcattatcctcctctggaacttttgcatcattccaaaaagaaactctacccactcaacagtaactccttaatcctcctgctcgtggtaaccactattttttgtgtatgtatttgaccatttttggtatctcatgtaagttgaatcacaatatttgcccttttgtgtctgacttctttctcttagcataatgtcttaagattcatccaagttgtagcatgtgatattgtgaaatacatatttggtcttcaccgtttcctggcatacgattccctggaatccccaaaacgctaagtgtctttttgtaggctaatgagtagactgagggctgggggctcctggatagcacaatcaggaacaattaagaaatggagcaccatgctaggacataccatgagtctgagttttcgcaaatgtaatgattttctcatactctgaaactaaacatttctgtgttgagcaaaacataaacgccaaggcgaaatgttcttgttcccttgcatttctgcagctgtaactgataaaggtctggacgtgcagttcacagcagaggagagagactgtggctgctctggacacatctggacgacaggcacccagccctcaagatgctgtctgccagctaggtggaaacacctcatgtgaatgggcccatttgcttcctctccactccaaaaggggatgagaagaggaatgttggtatgtgatttttgcagcaagcactgaactcaagcgaagcttggttatcttgccacctggaaggttaggtgtgggaggatgacactaaaagaactggcccagaaatccagggctaattttgttcccctttcccactgtttttgcagaaatctcaatataccacaggcagccaacagctcaggagaggatcgtgctccaaatgttcatcgagccaatcattgggacttctctgccaggttcccagggaagaatgttgtaaatgatggctgggtgccatggctaatccaaaatgaacagaatcgctatctcctcagagcctgggtccctagggcctggccaacatccaaggtgcctgggacacagacagccagtgaggggcatctggagccctgtgcagtgaagtagcaggcagtcaaggatattgaaaggtgtgcaggctgtcccagaccccacgcccagaaggccattcagagaccaaagaacatgactaactccaaaatgaagataaaaactacagttcagctatgaatgttttccgtctaaacactcaacaccatactactactttgtgctgtttacaatttcctagcctgctattaaataaaaggttccataaaagggggcaacagcccagaaaacaaaccatattgttgaagttgaacctctgcccatcccagaaaaccagcttgctggagaaacctgtgccatgtcccactgcagcctgggggtgccacggtgtgtgtctggtgtctatgcatactgtatccctagcacctcatggcactgggcatctaacaagagcccagggactagagacaggttcccgcatctctctcacggatgcacttgctgttgctagctcatgtggcctcctgaccctcgatttcttctatcaatacactaggctttctctgccgggaataccttgttctccaagacactccatctggctaaaatctttccttcaaaaggctttccgtgtgtcctccatttttgctaatttcaagcctgccttgggtggctttcccaactgttgctgtggccagaatttgccttatcacaatcacagggtatctacttaatgctgagaaactagatgctttccccctgcatctggaacaagacaagcatattcttactactctttttcaatcatacttcaagtccgaactaatgtaataagacaagaaaaggaaatgagagaggcacagattgggaaggaagaaataaaactgcctttgtgggggctgcgtgcggtggctcacgcctgtaatcgcagcactttgggaggccgaggcaggtggatcacctgaggtcaggagttcaagaccagcctggccaacatagtgaaactctgtctctactaaaaatacaaaaattagccaggcatagtggcacacgcctgtaatcccagctattcggaagactgaggcaggagaactgcttgaacccggcaagtggaggttgcagtgagctgagattgtgccactgcactccagcctgggcaacaaaggcgaaactcagtctccaaaaaaaactgtctttgttcacagatatgattgtttaggtaaagaattccggccaggcacatcacaaggccaggagatcaagaccatcctggccaacatggtgatatcccgtctctactaaaaatacaaaaattagctgggggtggtggcgcacgcctgtagtcccagctactcaggaggctgaggcaggagaatcgcttgaacccgggagagagaggttgcagtgagccaagatcgtgccactgcactccagcccggcgacagagcgagactccatctcaaaataaaaaaaaaaagaatcccgaagactcctggataagaagcaaggctgcgagatacacaaacatcaactgcttctttatataccagtaatgcacaattacaagcaaccacagcatctaccacactgtaatgctgtggccgcatttgttccccttcttccaagtgcatattggcatggatagtatctagtgagtgcttcgcaggttgacaggcctcaatgtgtgtttgaagaaagccagagattagccacgatggtcagccacacaaggcccaaagcctgaggcagaggctagcacatgatgtccgcagaccagccagtgtgtctttagagagcagtggcgcggagagtaaactatggccgctgaagtggacagggagccaaaaggatctggatgtgaggcagcatcccaaagtgcagtctcctgaccgtccagccacactgagattctgaagcaccactccgtccagcggcagagctttaagttggaaaatccaggggcataaagggagacaaatcaacttactctaaatcctctgaaaattcccttaacaaaggagttgtgttgacagagacttctctaatctgaagagcaactgtttctccctggttctctaggcatataaccctttctgcccacctctcatggagagtaggctctgacggcagaagccccccccaccaacagccaccacatgaaacaaacagatacttcaaagccagaagatctttgttcagatcctgcccctgggcaggcacctcagccccaggtccatcttctaggtggatttcgtaacatctaccttgtatctgtgaggagtaaacaaaagatacataaaagcagccagcatagcttctaacagatagacgtttaaaagttccttcccctttgacacacaaagtcacaggatgtgatacagcagtagccctcagttacattagccctcagctacattcttaacaaaagacacaacatagcatggcagccaggcctggcatggtctccagttgtgccctcccgttgaccaggctgcacagactgcagagccttccaagctgctccttctgcagtcctaaatctacttgagagccgctgctaagaaaacatcagatggactatactgctgctccctaccttcctgaataaacaacgtacacacgatacagagaagcactgagccactgccaccgaacccccccaaaccctggcttcacagagttttaaaatcgccttggggtactgcggttgcttttcaagtcttttacccatcaaagcctgacgcacttccacacattcctttgtagtgtttactggacaagtgcaaagaactaagatacgctctgtatttacagagctaatgggcctctttcacagcaagttgacatctcatctgcttttggacatgcctttgctcagggatcaggtttagtgggagatgccccacctgctggcaaatggaatacagctgtggactctaaccaggcgtcctcacttcctctgtatgaagccagccttcgtcacagcagatgatgtaagaggcagaaaccagctggaaaattgcaggtgaaatggtaatggcagcatataaggaccatgcccaggaaacccaagggaccaggtgcagcacggtgaaagagtgctgcctacatgtgtgcccatccacaacctcaagcatttctgcaatcctgcctgcaagatgaaagaaaaggaagcattacaggagattctattacaaccagtggaatctgcagttgggagagccactatgaggcacaagatgatggcctgcctcacaagggttacagcagcacccaacaatcctgagaaaagatccctctgtgcctgcctctgcaggcccaatgactcatagccaaatttggactttattataagcaacagtttattaaggtgggctctgcaaaaggcacaaacacgggtggaggtccacaaacaaaaacacttagcgtaagcactgatggaatatttggcctgtttttgccttgaatcttagctaagtatgtacaggactgtagttaactcaacggctttcaagaaaaatgcaaaatgctttctttgcattcttaatataaaagcttgtggttggccgggcacggtggctcacgcctgtaatcccagcactttgggaggctgaggcgggcagatcacgagctcaggagatcaagaccagcctgcccagtatctattaaaaatacaaaaattagcccggcacggtggcaggcgcctgtagtcccagctattcaggaggctgaagcagaagaatcacttgaacccggggggcagcggttgcagtgagcagagattgcatcactgcactccagcctgggcaacagggcgagactccaactcaaaaaaaaaaaaaaaaaaaaaaaaaaaaaaaaaaaaaaaagcttgtggtcacatcccttctctcctcaccccaccctgaaaaagagatgaaagaaattctatacagcttccctaacactttgaactaagccaaaattataacaatctacttcccacaaccagaaaatcagcttaacagaaagaatgcccaatcattcaaatatcaatccgactccgcctaagacccaaagaaagaaaacaggtctcacactaagacatccccaagcagcccaggataatttcctaggattctggcatttgggtaactgctggcacatcgtgtcacctttacaggtcacaccccaggtgtagcaacaaccctcttctgccggcacagagcccttccccagtcatggtggcaccacaaacacttgcagtaagtgggcacatggggagcaaacatgctcagctatcatggctgcccaccggggtggctaggtatcccccattttgtagaaataggcagtgtcttccatctgggaaagaagaggggctcttgtcagtcctgtctattcctgatccacgtgtctgtcttaagggagaaggccccatcactctatgagaagtgaccatcacatagagaatgaacagaatgacccctgccattttaaaaagaattccccaagactaatggttgctggagagttctgtaactttcacagaaactcacacaattcctttctcatgatatatgtgctcatatacccatcaaagtcttttacccatcaaagcctgacacacttccacacattccgcacacagattgctatgctatgcccacagcaaagtaatcaactcaagagtcccttggtggtggtggtgggtagggggtgaatgaagaagacaggtaaggcctgggacatccccgccatggccaagcccagctaagaagctggtcgacacaattttcgattttgtgatccccagcttcaagcataactctcaatatggacacatgtagagacacacacagaacagggacacatttacagggacatgtttccatggttccttcagtggcccagcatgagtggattccttggtatgacgttctgtttccttttccctaaggcaagtctgcattaaccagctggcttcactcaggagagtggggctcaacattccagtgctatgtgtccttacggcaagtggccacccacttctgcacttcacccacccaggcctgttaaggttcacgaggaaaacacgacttaattgctgctccacagaactgctgttctacagagagcgtatgaagagctgcctctccatctacaaagagaatcccttggagtttgcacctggccaggcacagtgattcatgcctgcaatcccagcactttgggaggctgaggtgagaggatcacttgagcccaggagctggagaccaactggacaacatagtgaaactccacctctactaaaaaattttaaaattagctgagtgtggtggtgtgtgcctgtagttccagctactctggtggctgaggagggaggaccgcttgaacccgggaggcagaggctgcagtgagacgtcacagccactgcaactgctgcctgggcgacagagcaagaccctgatccgataaataaataaaaacaaataaaaacctatgtgtcggctgggtgtggtggctcacccctgtaatcccagtactttagcaggccaatcacttgaggtcaggagttcaagaccagcctggccaacatggtgaaaccctgtctccactaaaaaaaaaaatacaaaaagccaggtgtggcggtgggtgcctgtaatcccagctacttgggaggctgaggtggaagaatcactttaatctgggaagcagaggttgcagtgagcagagatcgtgccactgcactccagcctgggtgatagtgggagactccatcttaacaaaaacaaaaacaaaaaatcaaacaaaaccatgtgtggggtagggcaatcacccgtaagacaaaataaaaagataaatatataccaaaaaaaaaaagaaagaaaatgcacctgggaagatgctccccgtcactagtcatgaagaaatacaaatcacagccacactgataccactgcaagactatgtgaatccactgcttcccacccctaaaaccctgacaataccaagtgctagtgaagatgagcaacgactaaaactctcatccactgctgatgagggcgaaaaatgatgcaaccctccagaaacatctgagagtttcctgtaaagctaaacatgtatttattccaatgacccagccatctcacttgcaggtctttaaccaaaagaaagaaaaacatgttcacacaaagaactgcatgtgaatagctttagcagcttcattaagaatcaccaaaaactagaaaccatccacgtgtccttcaactgagaaatgcagaaaaagctggggtctatccatatgatgaaacactactcagcaatgaaaagaaacaactgaaacactcccactaagtagtcagatgactctaataaactatgttaacgaaaagaagcctgactcaacctctacctcccctgcattgtatgatgccattttccatttaatatgacattctagaaaaagcaaaatcatagacacagaaaacagatcaatcgttgctgaggagccggacacggtggctcacgcctgtaatcccagcactttgggaggccaaggcgggcaaatcacgacgtcaggagttcaagaccagcctgaccaacatggtgaaaccccgcctctactaaaaatacaaaaattagtcgggcatggtggtgcgcacctgtaatcccaggtactcaggaggctgaagcaggagaatcacttgaacccgagaggcagaggttgcagtgagccgagatcgcaccacactgcactccagcctgggcgacagagcaagactacgtctcaaaacaaaaaaaaaaaaggctgggtgcagtgactcacgcctgtaatcccagcactttgggaagccgaggtggacagatcacgaggtcaggagatcgagaccatcctggctaacacagtgaaacctcatctctactaaaaatacaaaaaattggccaggcatggtggtgggcgcctgtagtcccagctactcaggaggctgaggcaggagaatggtgtgaacctgggaggcagaggttgcagtaagccgaagactgtgccactgcactccagcctgggcgacagagcgagactccgtctcaaagaaaaaaaaaaaaaaaaaaaaaaaagttgctgagtctcacgcctatggtcccagcacattaggaggatgaggcaggagtatcatttgaggtcaggagtttgagaccagcctggccaacatggtaaaactccatctgcactaaaaatacaaaaatcagctggacatggtggcgcaggcctgtaattccagctacttgagaggttgagactccagaattgcttgaacccagcaggcagaggttgcagtgagccaagattacgccactgccctccagtctgggagacagagtgggacttcatctcaaaaaaaaaaaaggggaattttattgcatataaacttaagagaataaacaaaccacatgcagtacaccaccctgaccccctttagacctggtacagagaccccccaggactgggagatgctgctttgcagggaaggcagacagacctgcaagtgcagcaggcaaggacagcctggtctgaaccacgagcttccatgctaacctgggggactctgagtaacagatgttctcagccttgtgtttcctgtctgtaaaacagagcagttcggccacgcacggtggctcacgaggtcaacagatcaaggccagcctggccaacatggcaaaaccctgtctctactaaaaatgcaaaaattagccaggcatcgtggcacatgcctgtaattccagcaactcaggaggctgaggcaggagaattgcttgagcccaggaggcggaagttgcagtgagctgagatcgtgccactgcactccagcctggacaactgagcaagactccgactcaaaaaaaaaaaaaaaaaaaaaaaaaaggattaaaaaattaaaaagtgcttttctgggccgggcgcagtggttcacgcctgtaatctcagcactttgggaggccgaggcgggcgcatcacgaggttaggagatcgagaccatcctggctaaaacagtgaaaccccgtctctactaaaaaatacaaaaaaaattagccaggcgtggtggcggtcacctgtagtcccagctacttgagaggccgaggcaggagaatggcgtgaacccgggaggcggagcttgcagtgagccgagatcgcgccactgcactccagcctgggccacagagcgagactccgtcgcaaaaaaaaaaaaaaaaaaagtgcttttctgaaaggagggctctagttaaggtaaaccatggttctgtgacttgtgctttacactgagagaacaaagcagcaagaccaacaatcttaaaggagtaatacacagtccatgtagggtacactacccctgcattcacatcaactggagaagagaagctatttccagctcaaagtaggggaaagttaatacatagctattcaagagtgtttatgtacagacagttaatcttgagaaatccaaattgtgtggctagaacaaagctactgtttacaatatttttcatactaatgcttcctggaggaccttccttggccccatgtttaaattttgattaaatgtcaaactagtaaaactatttgcctatgcggggatggggcggggggagaagacggttaggcaacacagtgccaaattcaaaactccgtactagctctgacagcgaacacctttagattcagaggagaaaagtagccttaaacaggacaattcagcctatctactgagatcatcttatcaaaaggagtaactgtcattacaataaaatgcaatacaacaatacaataaaatgcaacaaagccacgaagaaggaaaaaggctgcccagcattctagcacctatttgcacaattagcccacagagttacttacaaacaatattccccttatatagtctgtgttctgtttttgatggggcactgaatacagaacctatctgccaactttaactgtaatgcgataaccagagctcacacaaccacttctcgactgtttctgtcaggatgtttccagttttttaagtatcaacattacagggttgagaaggaccaacaagcatttgatggctaatgatgacaaagtccttgatcaagatgccagcaagaacattcaccacaacagactccatgcagaatgcttggagtgatgccctctgagccccaaagcacttgctctcacatttgaccaccaaggtaggatgaaagagctcagggtacaaagaaatatccactcatccgtcacagtgaaggattaccttcattatgtcctctccagaggtaaacccaaagtccctctgatcgctaacttttttacacttaccacataatcccaacccactctattcttccgcaagtcattcagagaaggcatacggtggtgacataaatgctgacgactaccaggtcccccggatctccagccgtctgtttgtttgcccacaggaacacacagtgtgtgctggcaataactaaacaagcttttctgcccaaggaggctgagctcactcagtgcctcgaggctccccaccatagttacaagtgctggcctaaccaagctgtgcctggaatcagccttgtcactgtgccgggggagtaggaaacagttaaaacacatttttatgctttcatttctataataaatgcatcagatatcacatgaaatcagctctaggactgactgagcacctgcctgctatacattttccaggccgccagtgccctgccaggggatgtgctgagcagccaaacccagcctggccatgatgcttgtagtaagctggcagacaatgtacgagcaacaactttcccagttaagcgccaactttccctgagtgtccacatgcttagggaagaaggttggacttaaaccaacaagcaattactgaatgcttactgagacatggggctcaatgtgtctgtatgctgtattccgacctcacaagaacctcgcacagggcagggattagggtctcagttttgcagccaaggaagctgatgcgagaagaaatcggtaattcatctaaggtcacacctgactcctcaccttatacccccaaaaaatcatttcctgatggatcaagggcatgaattggaagggcaaaaccttacaacttccagaagaaaatataaaatatatttcacttcaggatagtgttcttcccaccaaccgtaaaacaaagattcataaattcacctacattaaaattaagaccatcttttttttttttttttttttgagacggagttgttgcccaggctggagtgcaatggcgcgatctcagcacaccacaacctccacctcctgggttcaagcgattctcccgcctcagcctcccgagtagctgggatttctcccacctcagcctcccaagtagccaggcaggagccaccacgcctggctaattttgtatttttagtagggacagggtttctccatgttagtcaggctggtctcaaactcctgacctcaggtgatccacctgccttggctacccaagtgctgggattacaggcatgagccacagcacccagcctgaaatgttatttcttaataataagacttgaaaggtgaaactgatccatgggctgctgtatggatgttttagcaggcacgaaaacattcacctccttgtgcatgtccatcagaggtcttgggtgacaaggtgcatcaccaatgagttgtaatattttgaaaaatattttttctaagcagtaggtctcaacagcgggcttaaaatattctgcaaatgatgctgtaaacagatgtgctgtcacccagactttgtttttccctttacagagcacaggcagagtagatttagcataatttagatttaccataattcttaaggtccttggatattcagaatggctaatgagcagtagcttcaacttaaagtcatcagctacagtagcccctaatgagaggcagcctgtcctttgaagccaagtattgatttttctacagctataaaagcctagatggcattttcttccaataaactattttgtctacactaaaatgtttactgtagccacctttatcaattatcttagctagatctggataacttgctacagtttttccatcagcacttgctgcttcaccttgcacttttatgttttggagatggcttctttccttaaacctcatgaaccaacctctgctggcttcaaacttttcttctgcagctttctcacctctttcagcctccaaagaattgaatagagttactacggccttgctagattaggctttggcttaagggaatattgcagctgacctgatctatccagaccactacaactttctccatgtcagcaataaggttgtttcactttcttatcactcaggcattcactggagtcacacttttaatttccttcgagaactcctttgcattcacaatctggctaactctctggcttaagcagcctagcttttggctttcaaaatatgttattggccttttagcgttgttaaagggtattgctctgtcatccaggctggagtgcagtggcatgatcacagctcgctgcagcctcaacctcctaggctcaagcaatcctcccatctcagcctcccaagtagctgggaccacaggcgtgtgccaccatgcctggctactttttccattttttttatgaagacgaggcctcactatgttgcccaggctggtctcaaactcttgtcctcaagcgatcctcccacctacgcctgccaaaaaatgctaggattacaggcatgaaccccacgcctggccatttttagcttctgacttggtgtgagagacgcgagacccttcctttcatctgaacactttaaaggctattatagggttattaaccggcctaattttaagacagttgtgtctcaaggaatagagaggtctgaggagaggaaaagagatgggaaatagtcagtagctggagcagtcagaacacaaacatttatagactgaattcaccttcttagatggacatggtttgtggttccccaaaactatgataatgacacccaaaatcactgatcacgaatcataacagatataatagtctgaaacgttggtcacattaccaaaatgtgacacagagatgaagtgagcacacgctgttggaaaaatggcactgataaaagacttgctcaatgcagggtcaccacaaattctcaatttgtaaataaaaaaaccgcaattatctgcaaagcacaataaaacgaggtatacctatacatgcaacaaacacaaaaccggtaaactcaaaattcaggatgggcaaggaaatgaagtagggaaaggaacacacacaggaagcagaggtgactgaactggtcaggccaagtctcctcaagttgagtgacacaaatcagaatcactcaaaattgaaaggctaaccaaaacactgcaccgtcaatcacctacagcaccttcagtgaagtaagagcgctgcagggtgggtaggagcaattccctctgctgtgcttgaccctcatcagtaacaagcagagctaactctgacaggtggatggagtgcttctgctacccaatctcactgacagggaaacaggatcaaagattaagcaacctgctccagatcactgccaatgtctccaaattccagtgggtgaatgtccattttgagcttcagtaccactagtcacagtggtactcatctgtgcacctgcttaggtagtatattccattttcagcaagttctaattgcccatataaaacacatcagaggtacagagatctttaagcacaaaatgcaacactgagtctatctcatgccctttccaggacaagacaatgccaaaaaggaaaaaagcctgggcgcggaagtgagcacctatagtcccaactacttgagaggctgaggagggaagaggatgtcctgagcccaggagttctgggctatattgcatggtgccaatcaggtggccgcactacgtttggcatcagtgtggtgacctccaaggagtgggtactaccagattgcctaagaaggggtgaaccagcccaggtcggccagatgtggtggctcacacttgtaatcccagcattttgggaggccctggcgggcggatcgcttgaggccgggagttcgagaccagcctggccaacaaggcaaaaccccaactatattaaaatacaaacattaactgggcatggtggcgggcatctgtaatctcagctactcaggaggctgtggcacaagaactgcttgaacccgggaaacaggctgcagtgagccaagactgtgccactgcactccagcctgcacaaaagagtgagtgagactccgtctcaaaaaaaaaaaaaaaaaaaaagttgcggggccgggggggggggggggggtgggtcgcgtagtgaagaaaaaaaagaaagggggcaagtcaaaactcccatacctatcagcagtggggtcatgcatgtgactcaccactgtactccagcctgggcaacacagtggagacctcgtctcttaaaacggtaggttggctgggcgcggtggctcacccctgtaatcccagcactttgggaggcccaggcgggtgaattacgatgtcaggagttcgagagcagactggccaatgtggtgaaaccctgtctctactaaaaatacaaaaattagctgggtgtggtggcgtgcacctgtagtcccagctactcaggaggctgaggcagaacaatcgcttgaacccaggaagcggacgttgcagtgagccaagattgcgccactgcactcccgcctgggcaacagagcgagagtctacctaaaaaaaaaaaaaagtaatagtataagctgtgacactggatgaagaaagtggcaaaaataaaaatttgtaagaaaaaaattgaggacataaatttttaaaaagggggcaaaaaacataagctgaaactccttaaactttaaacatctgggctgggcgcggtggctcaaacttgtaataccagcactttgggaggccgaggcgggaggatcacgaggtcaggagtttgaaaccagcctgcccagcatggtgaaaccccgtctctactaaaaatacaaaaaattagccgggcatggtggcacacgactgtagccccagctacttgggagcctgaggcaggagaattgcttcaacccagcaggtgaaggttgcagtgagccaagattgcaccactgcactccagcctgggagacagagcaagactccatctcaacaaacaaacaaacaaacaaacaaaaataaaaactttagggccgggtgcggtggctcacacctgtaatcccagcactttgggaggctgaggcgagcagatcacaaggtcagatcaagaccatcctggctaacacggcgaaaccccatctctactaaaaatacaaaaaattagccaggcgtggtggtgggcgcctgtaatcccagctactcgggaggctgaggcaggagaatggcatgaacccaggaggtggagcttgcagtgagcagagcagagattgtgccactgtactccagcctgggcgacagagcaagactccacctccaaaaaaaaaaaaaaaaaaaaccaacaaactgtcaatctctggtaggtttaaaaggaatctttgctatcatctaaaagacaaacaacaattgtcggcaaagatgtggagaaactggaaccctcatatgtccagcaatgtaaaatggggcagccactgtaaaacagtctggcagttcctccaaaaggttaaaacataaataatgaatgtcccagaaattcctcccctacgcatatgccaagagaaagggaaacatttctacataaaaagtgtgtgtgggcactcacagaggtattattcataagagccaaaaactagaaaccaaaatatccatgaactgatgaacggatagtgtcatttctaaggatacaaccagattttctgaaattgggggtaggggaggggaatcaaagatgtttccttctcaaggagcaaaccgggtagtgtggcaatcaattctgaggctccatgctgcccttccaaggactgaggtactgtacccaagaatcactgtgccggagtgaaggacaaagcaatcaagtcatccaggcacaagtcacagaacactgagtgcggagagaggcagagcttgccaatctggcttcaccgggggctcctctcacctgttctctgtctgctcaagagttggtaagcaccctcgcacttaaaacattccaaaacccaagcttttgtggttacattctgaggcaatgcacagagaaatgttaattctgtgagccttttcaaggtgacatcaagacagaaactacttgctgtggaaatcattgtacaaagtgggtaggagtgagaagcccactgataggatgagtcccctgggagctgatgaaagggtgagatccaatccatttttaaacagtccttttttttttttttttttgaaagagagtctcactttgttgaccaagctgaagtgcaatggcgtgatctcagctcactgcaacctccgcctcctgggtgactggaactataggagcatggcaccatgtccggctgatttttggattccccccccccccccccccccccgaaggagtctcactctgtggcccaggctggagtgcagtggcgcgatctaggctcactgcaagctccgcctcccgggttcacgccattctcctgcctcagcttcctcagtagctgggactacaggtgcccaccaccacgcctggctaatttcttctattttgagtcgagacaggacttcaccgtgttagccaggaggtctcaatctcctgacctcgtgatccgcccgcctcggcctcccaaagtactgggattacaggcgtgagccaccgcgcctggccaatttttatagtttttattagagacggggtttcaccatactggccaggctggtctcaaactcctgatctcaggtgatccacctgcctcggcctcccaaagtgctaggattacaggcatgagccaccgtgcctggccttaaacagtcctttaggcagtcctgaaagacacctggctgcaccactgtttgaaccatctcccgtacctttgtgcctactcttcaccgatgcccaatatccatccccaaaatcagtttccgtgtggaggcaggatatggggaatttaaagcccctcagcaggcttccgcacccacgttcttagttctaacatgtgttcaaaaagtaagcaagatggccaggagcaggggctcatgcctgtaatcccagcactttgggaggccgaggcaggtggatcccttgaggccaggagtttgagaccagcatggccaacatggcgaaaccctgtctgtattaaaaatacaaaaattagccaggcatggtggcaaggggcctgtagtcccagctacttgagaggctgaggcacgagaattgcttgagcacaggaggcggaggttgcggtgagtcgagatcgtgccactgcactccagcctgggcaacagagcgaaactctgtctcaaaaaaaaacaaaaaaacaaaaaacagtaggcaggtggatatttgcacactcatgttcactgctgtattattcacaacagccaagaggtggaagcaacccaactccatcaacaaaggagtggaattctgacatgctacaacacggatggacctggagaacaggttattatgcttagtgaagtaagccagtaacaaaattctaaatactgtctgaatcggccaggtgcagtggctcacgcctgtaatcccagtactttgggaggcagaggtgggtggatcacctgagatcaggagttcaagaccaacctggccaacatgatgaaaccctgtctctactaaaaatacattaaaaaaaaaaaaattagccaggcatggtggcgggtgcctgtaatcccagctacttgagaggctgaggcaggagaatcacttgaacccgggaggcagacattgcagtaagccaacatcgcgccattgcactccagcctgggcaacaagaatgaaactccatctcaaacaaacaaacgaaaaatactcaacaaacaaaaaatactgtctgattctacttatatgaataactatggtagtcaaactcatagaaacagaaagtagaagactggctgccacaggctgggagaaagaaggaaaaggaagttattcgaaggatacagtgtcagctttgcaagatgaaaactttctagtgatctgctgcacgacaatatgcatatagtttacactgtaaaatggttaggatgttgcattttatgttttgaaacacatgcgtgtgcatgtaggcaaatgggttcagccgacattcctcaatactaacatgggaaaatgccctcacagggctgggtcaaatgaaatgccacacaaagcaagtgttcaataaacacctactactaataaaagcaagcatcggccaggcacagtagcttgtagctcccatttgtaatccctgcagtttgagcggccaagacaggcacattgcttgaactcaggagttcaaggccagcctgggcaatgtggtgagaccccatctctactaaaagtacaaaaaaggggccaggtgcggtggctcacacctgtaatcccagcactctgggaggccgaggcgggcagatcacctgagatcaggagttcaagaccagcctggccatggtgaaaccccgtctctactaaaaatacaaaaaattagctgggcgtggtggtgtgcgcctgtaatcccagctactcaggaggctgaggcaggagaattgcttgaacgcgggaggcggaagttgcagtgagccgagatcgcaccattgcactccagcctgggcaacaggagtgaaaatccgtcaaatcaaacaacaaccaaaaacaggctgtgcacggtggctcacatctgcaatcctagaactttgggaggctgaggtaggtgaaccacctgaggtcaggagttctagaccagcctggccaacatggggaaaccccatctctactaaaaatacaaaattagccgggcgtgggggcgcgtgcctgtaattccagctaccccagaggctgaggcaagagaattgcttagaagccgggaggcagaagttgcagtgagcggaggtcatgtcattgcactccagcctgggtgacagagcgagactctcaaaacaaaacaaagatgtcaggcgtagctactcaggagactgaggtgagaggatagcttgagactggagggtggaggttgccatgagccaagactgtgccactgcactccagcttggatgagggagaccctgtcttcaaaaaaaaaagtgtgaattgtggccgggcacggtggctcacgcccgtaatcccaccactttgggaggctgaggcgggcggatcacgaggtcaggagatcgagaccatcctggctaacacggtgaaaccccgtctctctactcaaaatacaaaaaattagccgggcgtggtggcggacagctagagtcccagctacttgggaggccgaggcaggagaatggtgtgaatccggaaggcggagcttgccgtaagccaatatcgtgccacttcactccagcctgggcaacaaagcaagactccatctttaaaaaaaaaaaaaaaaaaaggccgagcggtggctcatgcctgtaatcccagcactttgggaggccgaggcgggtggatcatctgaggtcaggagttcaagactaagcctggctgacatggtgaaaccctgtctctactaaaaatacaaaaaaatttgccgggcgtggtggtgggtgcctgtaatcccagctgctcaggaggctgaggcaggagaattgcttgaacccggcaggcggaggttgcagtgagccgagattgcgcactgcactccagcctgggcaacaagagcaaaactccatctcaaaaaaagtgtgaatgtaatgatttagtaagaactgtttaatgtattaatatttatatttcataatctgtaatcatggagtaaaagccaagcaggctgcatcacttgccctgcagtctcctagcacatgaactaatgggcaggcaggagggtgtgcatcatccaccttgcttaccgctgacctccagcacccagacaatccctggcactcagcacaagtaactgctcaataaccagaaacatcaagtgcttgccggaaaaactccatgatgagggagagggaagattacacagaccaaatttaagaatctctgccttaggaactcaggggctatcctgcctgaaccatcgataggggatattttcaagtcacctcaaccactgcttgactcactccaggtggacccaccactggcaccttctagtaccacagctcagccttgagtatgtgcttgaactttcgttcgcacttcacattttccacacacaaatataatgtgccaaaatgagccagtcctgctcccaaaaccctgctcacaaaatggaggacgtgagggtgtggacgcatagaatgaatgaaatgaaagatgtcagacaaagcaaattccaaagagaagtgggaaattttctagcctccaagaacagaggacaaaactattaaacatgatacttatctaggtcactagagttcactctaggacacattgttttggaaagaaaagcccttcaccattccccagattaaagcaaattcactaatctgtgttcttactacacaggggcctggctttctcaagtctgggaccctgctgggactcttatttccgacgtcctattgggaggagccctcacatccatcctcctggagatgcccaatgcccccaagtctggtctagatccacccttgcattccaggcttgcacatccaaccgcttcaatgacagcatccatgaggatgtcgacaagctccacatggtcaaggaactaaagtgaccccattttctctaaaacctgtcaaaacagggtgacaacagccctactgagtgttccaagcccccttcaaaggcccacttaccacaggggacagtggctaccaggctggataacccagctgcagaacagtcccaacactgcagaaagtccccctggacagcactgctttggaaattgggtaatacactgtaaaataagtaaggtctagaccagaccttggaagatggaggaaatggagtttggggggatgtctggaagaagaatcaaatgaacggaatgaggcaacagtgtgtcacagaacccaggagcccagggtgctacatgacaggagtgtaggtcttatcctatatgcagtgcggtttcagggtagcataatcatgctgtagtcatctattctattttgattgtgtacttttcaactagcttactagtagcactgtgcgtggagtttaaccacttctaccattttctctggactggctttgttttttttttccccccacaggtattcagagccaatttcctactgaatgagatcacgtgtcattttacgaagtcaaagaaaagatgtaaaagtaaaatccttcagggcacacctgttaaatgaatcaccacctttctagcacaggggtattaggatcttgtgcaacaatcaccaccggagacattaggatccctgaaacacctgcctcactcactgtcatgtctgcagtgaatgcagaacagtgtctgattaccaagtacatccagcacacgcattggacatggatgttgaccgagttccacttggtgtgcctgaggcaggcaggaaattctcttggaaacagaatccttaaggggattgggggggggaagcacccatgagctagaactcaattctaccctacagtaagcagcacttcaagggccgggcatggtggctcacgcctgtaatcccagcatgttgggaggaccaggcacgtgaatcacttgagatcagaagttaaagaccagtctgaaaatatagtgaagcctcatctccactaaaaatacaaaaaaaccagccgggcgtggtggccggcgcctgtagtcccagctacttgggaggctgaggcatgagaatcacttgaacccgggaggtggaagctgcagtgagctgagatcacaccactgcactccagcctgggtgactctgtctcaaaaaaaagcacctcaagaccgagaagcggccgggcgccatggctcatgcctgtaatcctagcactttgggaggccgaggcgggcggatcacgaggtcaggagatcaagaccatcctggtctaactcgatgaaaccccatctctactaaaaatacaaaaaattagccgggcgtagtggcgggcgcctgtggtcccagctacttgggaggccgaggcagaagaatggcgtgaacccgggaggcagagcttgcagtgagccgagatcgcgccactgcactccagactgggcgacagagcgagacaccgtctcaaaaaaaaaaaaaaaaaaaaaaaaagactgagaagctcaccataatcctgaaagagtatccagttcacaccataattttaacaagcctggggcacctggactaaagacacactccagtttacttacttccccccaaccatcccgcttctatattcccagacttgctctgagtagcaaaaggataaatggaagtgaaggcccggagcggtggatcacctgagatcaggagttcgagaccagcctggccaacgtggtgaaaccctgtctctaataaaaatacaaaaaaacagtcgggcatggtggcgcatgcctgtaatcccagcaactcaggaggctgaggcaggagaatcacctgaacctgggagacggaggttgcagtgagctgagaccacaccattccattccagcctgggcaacaagagccaaactccatctcaaaaaaaaagaaaaagaaaaagaaaaaatagaagtgaaaccaaatcaaggcaacttggttctctagcggaaactttttgaagatgaggttaaattccactcttgtgaatgtcttcatgagaaactcctcaggagggaagcactgtttttactgaccagatgtctgggtgaaaaggagacctgtccagtcagcattctgcatccctcttctgatcatcccctcacactggtgagcacctccaagggacaggtacttgctttcagacctgtccaggtctctttccaaacctctgctgtcctcattgaagaaccagactcaatgctagcccccttcctatgctcccagttggaaggtctcctccctctcaggctgccttgcctggacatcttggaaagcacttctgagctctaccctgtgctcactacgtatcatccaaaccatctgagttcactgagaacaaagctgaatatggtggactcccacagcttatgccacagcagacaagagctagtgggctctggacacaagtgctccaagtacttaccaactctgtgaccctgcaaccctgcccaagtgacagctctccaagcaccaccttccgtatctgcaaaccgggatgatactagtgcccagtgtatatggttgttttctgaggacttaaggaatgcgtagaggcttagaaatattcgctaaaacagaacaatcagcagcagtgtgctcaagctcagggtctggggagggcaatgtggcagtgaagtgaccaagtctgcagctccctacagcatcatggttgacacagaaactggactgatggatgtctggctccaccactttaaaacaggcatgcagtaagcaatagaaaaaaattaaggaagatgtcaagcatccagtcagaaaatgtagttttatactttacagggaagcctattcataggcagctatttgctacaaaccctgaacttttcagagtcaacaaagataaggactgctttaaggtgaacaatgggagtggggggtggtgggcaaggggtggtggtggtggtggtggtggtcaggaaggtcaggggaaagagacacaggccagaaagggtaaaccagctctcacaagtgcaaaggacatcagttaccagagcagacaggcctaaagactgaggataagcaagctgcaggcagcatgctacgcaactcaaaagggcccaatagagagaccgctctaacactggtaatttaaaactgcattcctgggattacagatagctgagctattattttgaaaaagatgaacacgaaggtggtattatttccaggcagctaatctgtcagctgaatggtttcctactgtcaaaaggaaaacatatgaagagtctcatacacacacaactctattacttggcagctttttataactgaaagtgcttcagagccaagtaatttttaatgaagattacaaatgaaaacaacctacacacagatagcaccacctttcacagaactctttcacgcacatgatcttatttctcttaattacaaaatagaaaggggaaactgcttaagttacaaaaatcatgcctgtacagtaagactgcaattcaactgagcagagaaatgggattaataaaagccaagaccaatggtacatgaatgagggaaaacatccattggcacatacaagtttaatcttcaaactatagagattggggcgggggggtgaaggagtctgtaataggtgctattcttagaagtaataagagttcttttccatcctctgactcaactctgccccaattacagaagtatgaattattcaagtttatggtattatatttcctattccttccaccagacaaggatgtgaggagaaagagagtggcactgtgtacactgcttggtgtagcatgtcgatatccctaaacgtaagcatgtcatgctgaagaatggtagtttcccacaagctttcttcctcaatctgcaggttccagtgcatgcgtaagcaaatgtcccgcagcacagggcacacattaagccacgtaagggaccacagcataaatcttgtaagcctacccacatccaacactaccacataaataatgaggctggctaggaaccattcagttaccttctggagcaaaggctccataccaacagcaaatcatggagacagtttacaaacagcagcagcttcagtgtagagccctagttccaagaccctcatctgcggcctttgcaacagacccattctggtacattctcaaattccttatccccaggaaagagcacaggctgacaaagttgggggcacaggggccctgggaaggttcacatcactgttgacacgttacctgacaactctgtgaaacctctggaggatttttgcaaggacaaaccaaaatgggtgatccaccctgtttccaagtcataaagttgtaaatgtctagaaaagtaagatacatgtgaaaaccagcctggcacagtggctcacctgtgtaatcccagcagtctgggagacaaagaaggcaggaggcttgctcaagttcaggagttcaagaccagcctgggcaacatagtgtgacctcgtcccttcaaaaaataaaaaaaaggctgggagcggtgcctcacacctgtaatctcagaactctgggaggccaaggtgggcagatcacttgagcccaggagttgcagcctgggaaacatggtgaaaccccatctccacaaaaatacaaaaaattagctgggcatggtggctcacacctgtagtcccagctacctgggaggctgaagtaggaggatcacctaggccaggaggccgatgctacagtgaatgactgcactccagcctggatgacaaagtgagacctcgtaccaaaaaataaaaataagctaggcatggtgacacacacctgtagttgcagctactcagcaggctgaggtgggaggatcacttaaacctgggaggtcaaagctgcagtgagccaagatcatgccactgcactccagcctgggcaacagagcaagaccctgtcttaaaaaataaaaataaaaagtattcaaaaccatcaagaggcagggtgaagtggctccgcctgtaatcccagcactttaggaggcctaagcagatgaactgcttaagcccaggactccagaccagcctgcctaagcaacatggtgaaaccccgtctctacaaaaaaataccaaaattagatgagtgtggtggcccacacctgtagcccagttacttaggaagctgaggtgggaggattacctgagtttggggaggctgagactacagttagctgtgatcatgccactgcactacggcctgggcaacacagtgagactctacctccaaaacaaaacaaaacaaaaaagccatcaatagccctttaaccaacatcgtaataaatttttcttccacagagtaaaatcaggaaattcattctggtacctggtctttagagttcaatgtttatgcctatgtgcatttttgtggagagaggatccaaagcatctgtagcatactcaaggagacctccagcctcctcttaaggagtgatgatctagagagaagcagggtcagtcccattcttagccactagactcaattattttgtgtctcctaaaggaataatatttccaacagtgagaactgtaggaaaacgattattacagtagaacttaacacttgtttttgattatggaaatctgaggaggcttttcgtaatgcttgaggaatgccaagcagcagactacgagaacttgagtatggaaatagcttagcaaatagcaaaattacaactgtaccttttgcaggcacggaagatagatgaatccagtctcctgaactaacaatagttactagtaataacaatataccatacagattacataagttatataaataacaacttgttatttatatggaagagagacctaatgtgataaacacaatttcaatcttgtaagcatttatttaaactttatatctacctggtctcttatccaagattttcctgaacactttaagctggtctcactcctgtgctcccttcagggctgttttcccgccaaactggatcattcagcccacccaagtaactcctgagacttggcttgacttctcccagagctccttctatgcctgacacaggtaagatacacagtgtctttcatttcatcttctacgaaaatatttgggatacacacatccttaactatcttcattctaccctttgtgagtaactcaattctgaactgttttccactaattctggtttacaaactagtatggaaacctcctttcagccatccataatttcttgctccaagttcgggggtacattttacttttagtataggactctgggccaggcatagtggctcacgcctgtaatcccaacactttgggaggccaaggcggatggatcacctgaggtcaggagtttgagaccagcctggccaacggggtgaaaccctgcccctactaaaaatacaaaaactagccgggcatggtggcgcatgcctctaatcccagctactcgggaggctgaggcaggagaattgcttgacccaggaggcagtgagccgagatggtgccactgcactccagcctgggcgaaagagcgagactccatcaagaaagaatgggaaagggaaaggaaagaaaggaaagaaaacaaagaaaaaagaaaaagagaaagaaggaaggaaggaagggaaagagggaggggactctgtccattggacaaagcatcccatctagcatgcctcttatcaacaagcgagatgctgctggagctaccacttgggttgagggaatggagggcagagaccagctacaggcgccatgcttgaggcaagccagttaagcattcccattctgcacatggtcagagatgggcaatgatccaacctagaatccactgccatcagaaagcactactgggaagactcactcttgaccttgaggtcagaacattagtgataaagaacaagtactgaagtcattgtggagcccttagattcaactactcttgagcctcatgttgcatcaggcaacaaactcccttctgtttcagctaattttgtttatttataccagagaaagacataagtaatacaaccatttcctcacagtcatctgaataaagttaggagaataacatctgagaataatcgacaagtagcttaccacacatgcacacaaatgacactctacatacttcttgtttcacctgtggcaaactactagaccttcaccactccatgcttctccaacttccctcaccctaccccctacaaagcttctaaaacacagtgggtacagggaagaaacgaaactaaagatccatgctttcacctgctactagaaagcatatccaggacagtcatcattgggcaaatgacaaagaaacagatcacaaaatggcacatacatacacacacacacaaatcaaggtattcacaattgccatcaagtagcatggaaaccaatgtaattcaactcctctgacatgacccccccataagaaacacattttatcatgtacacaacacctaagatcaaagcaaaggttttatgaaatatccttgaaaattgtgacaccctctgacatttcccttttctcccctatacaccaattgcaatccaccatatttgtttcatgacccatggttttgttttgttttgttttgttttcttctgagatggagtctcgctctgtcgcccaggctggagtgcagtgacacgatctcggctcactgcaagctccgcctcccgggttcacgccattctcctccctcaagccatgccatgacccatggttttaaaaacacaaagaaagccaggcgcagtggctcacgcctgtaatcccagcactttgggaggccgaggcgggtggatcacgaggtcaggagatcgagagcatcctggctaacatggtgaaaccccgtctctactaaaacatacaaaaaaaaaaaaaattagccaggcgtggtggcgggcgcctgtagtcccagcactttgggaggccgaggcaggcagatcacgaggtcaggagatcaagaccatcctggttaacacagtgaaaccccatctctactaaaaaatacaaaaaaaaaaaaaaaaaaaattagccaggcatggtggcaggtgcctgtagtcccagctacttgggaggctgaagcaggagaatagcgtgaacctgggaggcagagcttgcagtgagctgagactgcgccactgcactctagcctgggagatagagagagactctgtctccaaaaaaaaaaaaaaaaagaaaagaaaagaaaaattacccgggtgtggtggtgggcgcctgtagtcccagctacttgggaggctgaggcaggagaatggcgtggacctgggaggtggagctttcagtgagctgaaatcataccactgcactccagcctgggtgacacagtgagactctgcctcaaacaaacaaacaaacaaaaatacaaagaattattttcttccaattaattgggaggctgaggcaggaggatcatttgaacccagaagttcaagtccagcctgagcaacacagcaagactccatctctttaaaaaaaaaaaaaaaaaaaaaaaaaagaactgctctctcttaaaatccagattctgatcaaatttctctggaatcaaaacctatgcgccctactttatatatgaaaaactgaggctagagtggttaggcaacgggtccaaggacacaggcagatgtcccctgctgagtgtgccccagcagcccagtatggcccagactggcatccaccactgggctggcaggttccacctccatgtagtttttttgtttcaactctcatgataatgatctgctcccacaaaatatgtttcctcaaacagcatggaaaattttcaagtatgaagtccccaaatttttctcaccctcttcccttttctttacacaaaacaaaactttgaaggctaatccacccacagacatgtatgtgttactgcctgagaaggaacaactgcagacattagcaacacacaaggacacgagaattactaattcacgtttctgaaaattgtgtaataccaagcccaacacctctcccctggtgctggctgacaatgtaccagtgtctcctgactaacagcagctaggaacaaataaagagtttcagccttgagtggagaccaagacaaggaaggtgaccacacatactaagtaggaagggcctggatagcatttctcacactttttcaggcagaaagcaaagccagcactcctcggcccccatctttctcaacagtcccaggcatctttatacaattagacatgaggcccaggtcagtacccacatggtcccccttttgtcactgtgcaggcacactgatcccattttacagaagagaaaactgaggcttatggagacgatgtaactcccctgaggtcaaggccagaagggggtggggctgggactgcacccaacagtgaactccatggtgttctctctcctctcctgctctggtacacggctccacccaagcccaaccaatgctgtctgccacagcccaaggtcccagaaacttcctacactgggcagaacaggctaacacatgcctggggaggggggaaggggaaggatcacacaactgtctacacctaggataaacgaaaaatagaacaaatgtcaaatttattcacattctcttaatttgaagctaatgcttagattatgtgaccaacctctaaagaaaatatatctttcaattgcatttcacacaagcaaaaggcaacctttgtggaaccggatcccaatgacgcctagtaagtaactggacttaactggttcttctggtcaaaaggcccaaagtcgatcggcagtatgccagactcccagtcaggacctccacacatccagctgccaaaattactctaccaaacttttccagggagaccttacaccttcctggggaccagaatcctttcaccaagcccagatgccaatacaatcagaatcagagccaatggaggccagaaaggtatggaaagatgttccagtgttctggaaaaactttggcccaccagtgccttctggctccctgaccaagtctttgtgttcagataaccaggttttcataagatgggtaagttacattttaggcttgaggatacactgagccagcttcccctgctggatcatttccccaaactctgcagcaaacatcccagggtggatgcccccaaagctgctgcacctccactaatcccattatcactgctcttaatctcattatcagataaaaacaaacacaatccctctttcaagcacctcttccactggtctccactcagagctcacttggaagacgtggcacctctggaaggcacctggtgggctgtagtgtcacccagtaccatgccctggatcagctggtgcacctcctggctgtcagcagctctactctgacccctggcttcctcttcccacttctattcttcaccttgggcaaggacggcagtagctaaccttgagagggcacagcactgctgccaagccctgtgctgtgtgtcctctaaggcactgtctcattttaacctcatctgaaagatgggccaatgaagctctgggaaggctgagtgacagaatgaatgttacacagcaggtagcagggccaggattctaaccgaggcctgaatgtgccgtactggtgttatcagtctttggagcaaggcagcaaaaatgagataggactggatgccaagaggctgcccaagccctccaaggtcaccctccctagagcattccagttaagactggactgggctcgtactgccgggtcaggagacttgatttcaggaaacaaagtccaactctgggcaggagagggtagaaaagtcaaagggcaagagcctagagacacttctacttctcaccacattaaaaaagacacattttgttttcatacatcatcatttgtgggggaaaaaatgtttaaaatctcacccctataaacaagaccctgtcaagctctgattggagaaatggaaatacatgcaacctttccagaaaataagttaaatcaagttttcaaaaatatacacctcccaattcaaagatgaaaaaagagaaaacaccagatgaagtggctcacacctataatcccaccactttgggaggctgaggcgggcggatcacctgaggtcgggagttccagaccagcctgaccaacatggagaaaccccgtctctactagaaatacaaaattagctgggcgtggtggtgcatgcctgtaatcctagctactaaggaggctgaggcaggagaatcacttgaacccgggaggcagaggctgcagttagctgagatcgtgccattgcactccagcctgggcaacagagcaagactccgtctcaaaaaaaaaaaaaaaaaaaaaggaaagaaagaaaaagaaaacttggaaatcatgtccaaatgtccaaaaatagcagaattaagttatggtacattcatacgacagctaagcagccagttaaaacgaaacattttggaaatgttcacaatgtagcattaaaaaaaaaaaaaaaaaaaaaggccgggcgctgtggctcatgcctgtaatcctaatcccagcactttgggacgccgaggtaggcagatcacttgaggcgagaggttcaagaccagtggggacaacatggcaaaatcccatctctattaaaactacaagaaattatccaggtgtggcagcatggggcgcctgtagtcccagctacttgggaggctgaggcacaagaatggcttgaaccggggaggcagaggttgcaatgagccagtctctgcatgggtgacagagcaaagacttcagcataggtgacagagcaaaactctgcctcaaaataaataaataaataaaaattaaaattaaaaacaaagaacttcactacaaccaaattgtgttactcagacaaagacaaataactggaaggaaagaaaatgggattaagagatcatttttaaccatcattttaacattctactttttccaaattccttaaaatgaccatgcactacttttgtttaaagaaaaagccttacaatctccttttcaaatgatgtggaacaaccaatgttattcctcttcaggacgaggacaagaatgggacagacggctgctctgccctcaccctgactcagaactctcttcctctgcttcttcagagtggactacattccatgaattatgctaggacatgtgcacgtggtttaattgaggttggtagcctgtcgagactgaaaacaaactgctttaaaacatcaccctttacaataaaggaactgcaagtttggggtgcatctccgagactgttctctatggagcagcatttcaaactgttctgtaaccatgcacaatgtaaaaaaccaaacggtgaccaaaccatgaaggcagaatacaacatgtcaacatgctgatatccttgcagttccacttcctcattcatttaaacagttactcagtatcccactaagcttttaaccattctacctaagtactagaaacatcaatgccattaaaaagtcgctgtgcaccctcaaaaacttaaacatagatatatgacccagcaattccactcccagatatctgtcccagagaaactaaaacctgtacgcaaaaggccaggcgcggtggctcacgcctgtaatcccagcactttggaaagctaaggtgggtggatcacttgagctccggagttcaagaccagccaggccaacatggtgaaaccccatctctactaaatagtaaacacaaaaattagccgggcatggtggcaggtgcctgtaatcccaattacttgggaggttgaagcaggagaagtgcttgaacccggggggtggaggctgcagtgggctgagatcgtgccactgcactccagcctgggcgacacagcaagactccgtctcgaaaaagaaaaaaagagaaaaaaaagtacacaaatgtatttttaacagtactattcacaattgccaaaaagtgaaaacaacccaaatgttcaccactaatgaatgggtaaacaaaatgtagcatagccatataatggagtatcattcagttataaaaaggaatgaagtactgattcatgctacacagcaagaaccttttggaaacagtacagtgagtgaaagatgccaggcacaaaaggttacatattgtaggattcctgaaatatccataacaggcagatccatagagacagagagtagatgagtggcttccaggggcaaaagtggcggggggtgggcaggagcatggggaatgataggtaatggatttcttttggggggggggggtggaaatgtcctaaaattggttgcagtgatggctgcaaatctctgtaaatacatttaaaaactgatgattgtatcatgtataacaacgtttatctcaaagctattattttcttaaaaagatgtttggtaggattttacaataatagtatgctcaaattatacataattgatattcaataaacgtggaggatgaacacgctaataataaagactacgcatattaaagtcattatacaaatatctttcagtctttccttgtacatagtaagggctcaaggactaattgtagagacagattggccaatcatgcacacataaaatcaaaatatttaaaaatgtgttcaatgtttaaaaaaaaacttaacaggtttttattgacaacatgagattcacattaagaaatgctacccatatgtgtttattgcccacttcatatccctcttgaaaatacttttggcaggtcagggttgaaccacagcgcaaagccactcaccgcacttcaaactgctaagtgggaaatgtccagtagtgcatggaaacacactgcatgccaggctgctcggactaataagtttactacaacaccgagggaccccagcgttatcttagttgaaactcacattccttgtaagtcactaccgaacaattatgtccacggctaacaacatttttaaagcgggattatttgcatttggcattacggcatgcaaaattcttgctcaattacttctcccgtttattcattgagactatttaaggtgctcttctaggcacaagatacaacagaataaaacaggcaaagccaagcaaacaaaaccctgccctcatccaacttacattctggttttgttttttgttttgggacggagtttcgctcttattgaccagactggagtgcaatggcatgaccttggctcaccgcaacctccgcctcccgggttcaagcgattctcctgcctcagcctcccgagtagctgggattacaggcatgcgccactatgcccggctaattttgtatttttaatagagacgtggtttctccatgtttgtcaggctggtgtcgaacttttgaccccaggtgatctgcccgcctcggcctctcaaagtgctgggatcacaggcgtgagccaccacgcccggcgcattctgctttttttttttttaagttaacaaggaaattttatctttccaaactcatctcttatgtattaaatgtcagcaccagcaaggaattccccacaattctcacctcgcaaatgtacactcttttctagacaccaaaaatcacaaagatttatgaaacattaggagctccaatgacaagcttatctttcctttttacagatttgccaggaacataaagacaaacatggtctactctacaagtttattcaaaatcagaaaccaaaacattttacattcacaaaatacaacacactatacagtaggttgtcagaagcagatttaacagcccagggtcttcaaatcactgaggtgccaaatggttttttgctttaaaaacaaaacaggccgggcgcagtggctcatgcctgtaaacccagtactttgggaggccgaggctggcggatcacgagatcaggagatcgagaccatactggccaatatgatgaaaccccgtctctactaaaaatacaaaaattagctgggcgtggcggcgcgtgcctgtaatcccagctactcgggaggctgaggcaggagactcgcttgaacccaggaggcagaggttgcagtgagccgagatcgcaccactgcactccagcctgtcgactgacttcagactctctcaaaaaaataaaaaataaaaacaaaacaaaattcaatctcttaaatctgtaaatctgaagtcattcaataacctgaattgtgaaacaagaaaatattgttacccccacctcctaaagcaaaagtgcaatttagtacaaagatcacaacaactggctcaaaaaggcaacttttagaaacaaagtctaaattcctttaaacaattcaataatttagtggaaatgttactaagtggccaatgattctcgttattcttagctaaaaattttccctcgctgtcctccagactagcgaagctaggcatatagcaccccagaacagccaaacaatccttaaaactcagcagctaccttcttatctttcatccgtaggcaaagttccttatcttcagcaattccactgggctgactgctagcaagatactcggaggtggactcgactccttccaattaagaccaactaaagccattctgagaccggctaactccagtttgagcctttaagatactatgtttcctaccaaagaaagaggtatggtggataacagagcagcaatacattttgtttcagattaggctttgccttctccatttgatcaatggaaaccctgagtggtttatctttccctggctgaagtttttggggggaagcgcttggttatctacaacgcatcagtgataagataaaaagataaaaaacataatccccacccaaattaaaccgaaataaatgctttatgaaattattggcggccgggaacggtggctcatgcctgtaatcccaacactttgggaagccgaggaggatggaacacctgaggtcaggagttcgagaccagcctggccaacatggtgaaacccgcgtctctcctaaaaatgcaaaaattagctagatgtggtggcgggcgcctgtagtcccagctactcgagaggctgagacaggagaatcgcttgaacccaggaggcagaggttgcagtgagccgagatcgcgccactgcactacagcctgggcgacagagcgagactccatctaaaagtatatgtatatattggcaagatcataaaacagattgtgccatcaaaaactttcttgaaattaaaaacacattcataaatccttttgagtatcgctttctttacaacttccaaagacggtagggaacttgacagctccattcacaaaaaactcccgaccattgttacagccccaaagagccactggcttacgaggtaaactgcgacttggtttttggaaccacggactggtagagccctgtcgaaggtaagcaaagacattccaattctcgtgaggcatacattccaaggggtcactagcatccaacacacacgcagagaaatgaacccaagaccagacaccccaccaggctgcacgaaacgtaaacaagtaaacaagcaaataaaaatcttaaaaaaacaaagcgtagtcttgagtaaaagggaggtcagccacccaggagaagcacatgactcatgcaccggcctgaactaaagtatttacaccgtccactacaacagagtggggtttcccatcttcaagcaaacccaagccttgggggcatctcagccgagtgaagccatgctatttccgtttgggaggagggggatcattttatttcgctgaatcacaactcccccacatccccaccccaaatcaccacaatcaccaccaccacacaacactgcaaataaaataggccgttgcaaggacgccggcgagcacggaccgagcaaaacaaagcgcccagcaaggggctgccaggctgagagtgggtgcgtcaagcgggccaagctcgcctccagggcaccgctcccgccctgaggcctggcctcagaccggcgtgcagccgcagccacctccctccgcaggggacctgcccctttctccgcagcactccggggaccgccgggaaggtgaagagatgggggtgggggcgcgctgccccggcccaggcaaaacgacctgggtgccagaaggagagcgcgccggccccggcccacgtgagcgccgcggccgagcccgcctagaggaccgcggaccgggacagctgcgctcgcggcccccgcgccaggccgggacttacccgggccgggcgcgccgcggaccccgcggcggccgcttcctcctcctcctcctcctcctcacttaacaaaatggcggcggcaggaagtgccgggcgcctcggcccgccccccgcccgcccccgaccgccggccccgccgcggcgcccgcgccccccacccgcgccccgccggccagcccaagcccgggtccgacggcaccaaaggcaggacagccgcgagcgaccccgccgccccgacaccaacggcgcaggccgccccggcccggaacgaacggcgcgggaggcccgcaggcccgagcccgcgtagccccggcctccccgcccccgcgccgcgcggatggcgtaggtggcggcgccccggccccattacgcaatgcaggttacgcggaccgcgccgcgagcctccgccagccgcccagtgtcgtccgccgccccaaagggcaccagtcctcacctgagacgctaggccgcacgccgcccccgccggccgtccgcccgctgccgccgccccctccccgagctgcctgcgcggcgccggggcccgcccgccgctctgccgagctcacaggccgcgctcgcccgcgggcaccgccggcagccgccgcagccgctgccgccgccactgcttcggctcctcggctgcgggagaccagaacaaacagcccagccgccgccgccgccgccgccgccgccgccagcgcactgacgtcaccgcgcacgctgcgcgcgcggccccgcgccgccgccgcccggtgtgcgcgccccgcccccgcgcccagcgcgaacgagctctggagagacagtggctgcgaggtgagtgggggataccgcggactgagggaggagaccccgcagagcgaaggagcgggctgggggaaacgggcggactgcaggctgggcctgcgggaaaagatctgaaggctgagagagacatccaaaatactaagaaaggtctgaagacagaccctcgcagggagggaggatggtgaggagggaccccacagactgatggaggaggcggaggagagagccctaaggggggaccccaggtagggaggctgaggcgagagagctgcgatgggggcgccggggctggggtgaagtggaggaaaggaggtgagaggaggctgcgagcaaggccgaggcggatcctccttggctgcccctgggcagggaggtagcacctttctcctcttatgcccccctgttgatcttcttccaacccacctttttaaaaaaagggacatggtcttgctctgtcccccaggctggagtgcagtagtgcagtcatagctcactgcagcctcaacctgctggcctcaagcgatcctcctgcttcagcctcccaagtagctgggactacaggtgtgcaccaccacacccagctaactattttttgtagagatgggatctcacgatgttggccaggctggtctctgtctcctggactcaagcgatcctcctgcctcgacctcccaaagtgctagtattacaggcgtgagccaccgcgcccagctccttcccatccttaagactcaaccccaagtcagaccaggctcggtggctcacacctgtaatctcagcactttgggaggcagaggcaggaggttggcttgaggccaggggttggagaccatcctagccaacagagtgaaacctcgcctctactaaaaatacaaaaattagccccgtgtgggccgggcgcagtggctcacgcctgtaatcccagcactttgggaggcgggcagatcacgaggtaaggagatcgagaccatcctggctaagacggtgaaaccccgtctctactaaaaatacaaaaaattagccgggtgtggtggtgggcgcctgtagtcccagctactcgagagactgaggcaggagaatggcgtgaacccgggaggcggagcttgctgtgagcggagatcgcgcccctgcactccagcctgtgcgacagagcgagactccgtctcaaaaaaaaaaaaaaaaaattagccgggtgtggtggcgcatgcctgtaatcccatgcctgtaatgccagctactcaggaggctaaggcagaagaatcacttgaacccgggaggcgtaggttgcagtgagccgagattgtgccactgcactctagcctgggcgacagagcaaggctctgtctccaaaaaagaaaaagactcaaccctaagtcagctccaggacgtatgtgcctactctacatgtgtgagtccgaggggaaaaaacatcatatgacctcttctagggcttccaaagcaccccacctggccacggaagagcttagtaaacatggggtagttttgagattgctaaaaggaggaagttaggcatatgtctcttgtagcttaaaataatactgtgaaatttttcaaacctggaaacaaccacttctctttccttttatatatatatatatttttttttttaagacaagatcttgctctgtcacccaggctggagtgcagtggctggatcatagctcactgtaacctcaaactctcagtctcaagtgatcctcccacgtcagcctctttagtagctgggaccacaggtgtgcgccaccgtgcccagctaatttttgtatttttgtggagaggaggtctcaccatgttgcccagactggtcttgaattcctgggctcaagcgatccacctccctcagcctcccaaagtgctggaactacaggcgtgagccaccgcacccaggccattctcttagcattttgtattcccatcttttaaaaatggaaagcaggctgggcgcggtggctcacacctgtaatcccagcactttgggaggtcgaggcaggtggatcacctgaggtcaggagttctagaccagcctggccaacatggtgaaacttcgactctactaaaaatataaaaattagccaggtatggtagcgggtgcctgtaatcctagctactttggaggctgaggcaggagaatcacttgaacccaagaggcagaggtggcagtgagctgagatcgtgccactccactccagcctgggcgacagtgagactccatctcaaaaaaaaaaaaaaaaaaaaaaggaaagcaaactcagttctaaaaagtctacatggggccaggcacagtggctcacacctgtaatcctagcactttgggaggccaatgcgggtagattacctgaggtcaggagtttgagaccaacctgggcaacatggtgaaaccccgtctctactaaaaatacaaacaaaattagccgggtgtggtggcgggcacctgtagtcccagctactcaggaggccgaggcaggagaatcgcttgaacctgggaggtggaggttgcagtgagccaagatcatgccactgcactccagcctgggtgacagggcaaaactccgtctcaaaaaaaaaaacaaaaaagtctgcgtggtattttttttttaagtccaagtaatgaaacatttcctgatggcccatggtttcagaatatatggatataataggataccagtaaaatagttcttttctatcatgtgtttgctcatgcttaaccaggggcaatcataaatcactaatgggtcctaagcaaagttaaaaattaaattttttcattcattcatgtatctatgtattaatttattcatttatgacagggtcttgctctgttgcccaggctggagtgcagtgttgcattcatggttcaccaaaggctggagtgcagtgttgcattcatggttcaccgaagcctcgacctcctaggctcattcaatcctcccacctcagcctcccgagtagctgggactacaggcatgtgccactacacccagctaagtttttaaattgtagttggctgggcgcagtggctcacgcctgtaatgccagtactttgggaggctgaggcgggtggatcacctgaggtcggtagtttgagagcagcctggccaacatggtgaacacactagtctgtactacaaatacaaaaattaaaggccgggtgcagtggctcatgcctgtaatctcagcactttgggaggccgaggcaggtggatcacctgaggtccggaattcacaactagcctggccaaggtggtgaaacctcatctgtactaaaaatagaaaaaatttgcggggcttggtgacaggtgcctgtaatcccacctactcaggaggctgaggcagaagaatcacttgaacccaggaagcggaggttgcagtgagcagagattgcggaggtggaggatacagtagtgagcggagatcgcgccattgcactccagcctgggcaacaagagtcaaactctgtctcaaaaaaaaaaaaaaaaattagccaggcatagtgttgcatgcctgtaatctgagccacttgggaggctgaggcaggataatcacttgagcctgcttaagaggtggaggttgcagtgagccaaggtcgcaccactggactccagcctgggtgacagagcaagactctgtctcgaaaaaaaaaaaaatttgtagccataggatctcactgtcttggccaagctgatctcaaactcttggcctcaagtgattcttctgccttggcctaaccctttatttttaacaaagcatgagaaaacaagttattagctgcaagaaataaaggatgtaattgtaactccttcattgaaacttccttctaactctgtattacagaatattgaaatttgtgaatatcttctggctcctaattttgcacccctggcaattatgcagaagatgatcagaaatggaaaaagagcaggagggtacccagggctttgtgaataggtattaacaactggtttgttgttactgggttttttgtttgtttgtttttttaaggaaaccagaatgtatctattttaagctctccttccctatagttatcttgtcttgctgcattatccacttaatttatcattgttggccaggcgcggtggctcacgcctgtaatcccagaactttgggaggctgaggcgggcagatcacgaggtcaggagatcgagactatcctggctaacatggtgaaaccccatctctactaaaaatacaaaaattagccagacatggtggtgagtgcctgtagtcccagctactcgggaggttgaggcaggagaatgtcatgaacccgggaggtggaggttgcagtgagccgagatcgtgccactgcactccagcctgggtggacagagcgaggctccatctcgaaaaaaaaaaattatcattgttgttgacaataaatgtttttggaagtaatttggaactgttggtttgcaaatcacataataaaagccctcactttactgtagagtcacacttaacattagacaaaactatatatctagattgataactagaccgaactaggtggcttttggccattgctacaaattaaatccaacctggaaaaaatattcaggctgtaaaggcagttccaaaagctgtctccaaaaatcgtttgggacaacaatgtctcattctttttgtcttccatggtgctttgcctaactcctcgaagatagctcaaactcagaaaatgtttatctggttgagtcactttaataaaaatagtcttgttacctcatggttcacatgttatttatttatttatgaaacagtctcactctgtcgcctgggctggagtgcaatggcatgatctcggctcactgcaacctccacctcctgggttcaagagattctcgtgcctcagcctcctgagtagctggaattactggcatgtgccaccacgtccggctaattgttttgtatttttagtagagacgaggtttcaccatgttggccaggctggtctcgaactcctggccttaagtgatctgcccacctcggcctcccaaagtgctgggattacaggcttgagccatggcacctggcttatttatttatttattaagttataaagacaagatctcaccctgtcacccatgctggagtgcagtggcataatcatagctcactgaagcctcacccttctccactcaagcaattctcccacctcagcctcctgagtacatatgactacacccatgccccaccacacttggcttttttttttatttattttttttgtttgtttgtgttttgtagcaataaggtttcactatattgctcaagctagaatgcagtggctattcatagacacaatcatgtctgactatagccttgaactcctgggcgcaagcaatcctcctacctcaacctcctgagtagctgggactatagctgcctgcccagcttagattttaattctatgcatcaatgtgtatcaatgtatagaaatagttatgttatttaaacaaaagggatcatcctatatctgttgctttttgctgttttcttttttttagacagagtcttgctctgtcacccaggctggagtgcagtggtgcgatctcggctcactgcaacctctgcctccagcttcaagcgattctcatgcccctgcctcccaagtatctgggactacagacatgcgccaccacagctatttaattttaatatttttactagagacacggtttcaccatgttggcccgactggtctcagaatcctggccctaaatgatccgcccacctccgcctcccaaagtgttgggattacaggcatgagctaccgtacccagccagcttttttaatttaatacatacagcccagaactcctagactcaagcgatcctcccagtccacctcagcataccaaatagctggga

SEQ ID NO: 97057 - DNA, 13370 bp, Homo sapiens
ggaggttgcagggagccaggactatgccattgcactccagcttgggcaacaagagtgaagctccgtctttaaaaaaaaaaaagaaagaaagtcgtgggtgagcctgaaaccgaagcctttctggatgtactgggctccccaagtctgttctggcccctccgtggtgcatgagggtgagtgagcctctgaagcaggcagctctctggtgtccatttctcctcagcacatttagactgaatgtgtcagaacccagaacacatgatgtttatttttttccatttgtgtttcactgctcccccgccccctcccccaaaaggagaaagccaaggacttagaggtattccctgagaactaatacactcagtggcacttctgctcccctgacacagctttctcatctccccaccgcctctcacgtatcagcatgtggcccattgaggcagaaatagtttgagcctgtctgtctgaacaatgtttctgttttctctgcagttacatccttgctaagccccactccggctacagctcttgctgtcagatacgcatccaagaagtcgggtggtagctccaaaaacctcggtggaaagtcatcaggcagacgccaaggcattaagaaaatggaaggtgaggatgtgccttggcttccccttcctagctgcaccctgtcctcatgttccttaggagagcagaagaaccctgcgtgtgcctggccctgttcttccttaccatcataattggctccagtttaaaggaacggataagacctgaggaagggtcatcgagtgggtgggtgtgagccataaccatgcaattagagacaagagctgctgggtggcagatcctgcgctgcttgtgttggactgtctgggagttgtttttggccaggggcaggcttggaggttggtgtgcagcatttgggccatcatgttttcttggtagtttgctatgctgccccagtcactgtggacttctcttctaggtcactatgttcatgctgggaacatcattgcaacacagcgccatttccgctggcacccaggtgcccatgtgagttgctccgttgctgcccccctttttccttttctaggttgacctctccttgcccctaagcatggtaataacagttgcatgtattgagtgcttaccaaatggcaagcattgtgctgattcccatgcctacacgatctcatttcttccttaccacatccctgtaagtaaggtgaaatgccagagacctagacggggtggaaggagcaagtgactgctgggatttgcaccaggtctgcctaactcccagatcactatgatttgccctggtgttgcattggcctggtattcttggttctcctttctaaccctcagttcttggaggacaagatacctggtgatttaaaatattattttagtcttgggaaactaatttcaatttattagtttttcattattctaagacttcttcctttgtataaacttacttgcagatggttgaaagatagcttgaatttaatgaaatagaattcagtgtgccaggagttaggttcataccaggtggggatttcagtttcagcaagttggcatcatttttatagggtaggacagttctttgttacagagacataacgatactgtactctccacattattttaaatattagttgcctttgtaaacagtttcccctcccccacccctttttcgataattttagtaggtacaaaaaggttgatagtaacctgtatttatttcaaagatgctaatttgtatgtgaattgattatgtatgtagtagctttttaccttttagaacttaagacattagatgtgtggctatgtcaacaataataatcaaagctaacacattttgagctagacagtattctaggccctttatgattgttgagcattaatcctcaaaatgaccctgtaaaatagttaatattatccccatttgacagacgaaaaaatagaggcacagtgaagtaacttgcctaagaccacacaggagtaagtagcagtgctggtatttgaaccaggcatcctggctccagagcccattcttttaatcagagagacagagaataatgctggactacctgggtaaaatttgccacacacccagcctgaagttctaaaagaaaaagctaaaaaatatggttaaaaactgtatatacaacacagtttaatctctctgcttcatatttcacatctgaaaagtggcgttggaaataatacctctttcactaggtgagaattaaatgacttaatgtgtattaaagggcttacatgggtattagctaatgcagtagtatgattgttttattagcatatgcattatccatatagctttggtttatattttccatagagcctaaactttatagatcactatctaaatgaaaatttacatcaaactagtgttttaatatgacagttctagtgttgtttaagtctaagtgaagatttagggcatcttcctgggttttgggatttgtgcagtgtggcttctgaccagctgcatagacatggctccaggtaacagtccctgggactgagcagtggcccatgttggctgttggagctttcttttccctcatttgttatgagtcaataaagaagcagaaggtttggacgtgctagccagtgggaaagggaacctgagatggagctctctgatcaccctttcagccccagggcccggctctgtgtgagaagtctgtcccaaaattctgggacggaccacctcgctgaccagctgaccaggtctgtgtgttgcaggtgggtgttgggaagaataaatgtctgtatgccctggaagaggggatagtccgctacactaaggaggtctacgtgcctcatcccagaaacacggaggctgtggatctgatcaccaggctgcccaagggtgctgtgctctacaagacttttgtccacgtggttcctgccaagcctgagggcaccttcaaactggtagctatgctttgatgtcctgttgaggccatcggacagagactggagcccaggtgacaggagatggtgataccagaagtcaagggttggggtggcgacacggcctcccgaggaagaggtctgcttgatggtgactctgcaggagactctgaagtgactgctgggaaaccctttgggagacctgacctggggccaaaaataaagtgagccagcgtcatgaacgcatgctatttagggacacacctggatggaactgcctggtgatctgttggtccttacccaggttctctagtgcacaccaacggggagcctcaaagcaggaaagaacatatctgagtgaggaaatgagaaggggggactttgtaggagggacttgctttggcactgtcctccagagggggaggaggggagcttgtgcttgagggtgtcattgctgcttctcctcttagatcccaaaaaaggccaagggctgggccctgggaggaggggtgggagcagccagtaaaggaagcaacacagtcatgttctcctgtagccacatgccaagggagctggggctgcagccccagaggtggccacaggaaaccctcttccctgcctgtccaggtctagggcagagagagagcttgtgggatggcaggagatgcttctgagaggctcagtcaggccccaactgccctggactaccgaggtctttgcagtggtagggcagagtaggaaacaaatggcttcttcccgctcacctgaagagctaggcgcaccaagcccacattctcttctcgttcttgatttatctcaaacgataaacagtagcaaagaatctggcttcaggaatactcggtgagggcttagagtgggctggggtcaggccactctattgtcatcccagccaggacctttagaggcttggctttgagtggaggggccgggaagaaaatctcattttggatggtcattcctggctgttggaggtaggtggtgttggctacagccccagagaggggctgttgggtccagtgacttctttcagggactctactgtgccctgaaggtagacactccagggattgaggtcagagaagcctcccagttctggagttctgccttgaacatgtcatcttgttttcccaggacatgaccctagattcctcacctcctgcaggtccttgacagaggtgacctggggtttgtggggtttactttggcaccctgtgtgggggcatcaggtaccaaggcccagctggggtagtctttaggcaggggagattgatgggggctacctccacaggctcagtgctctcctttccaatctcctggagaaaggggaagggcaggacagaggtggttgctccctcctacactgtggtgttcccctgagcagggcaggtggctgcttcctgggatgactgagtagagccacagctggccggtggtggaggcagtgaccttatggcttcctcatagcttggtggcagctggagagatgggagagcaaaggcattagccactttcttgccctcttcccatatatgcaacaccctttctttggactgttgctttctgcatctccgctggagatgttggctccatggaaacccctctggttaggcctccttgggctggggtctgcaccatctacacaaagaggtgaactggggtctccagtcatatccttgagttctccactagtggtccttttcctgaccccagggcctctaattgggtattgtgtgttaaaatgcgatatgtgaaaagctcggttacccagggcacccagggctgagaaggctggacattcacctctctgcaggcccggagcccgaagctctgtgcaatcagctggtgaatctgctgctgccggtccttctttcgaacactctcatagctgggcaggcgagctggctgccacaggggcagctggtggctcctgggcagccccacacagaatacctcacccccctgggagtggccctgtgaccaaaaaaagccaagggagccagggaggcatgcaccagcgttatccagcttcggtctgggtcctcttctgcagagcaagcctaagttcaggggtattgcgctcctccctctcctccaagaagcctctccagtcttcatcccatccttcccctcccctgcgttctttttagtccccttaaccacgctaggtcccttgcctggcttcagaaccccagcacacactttttcccccatcccaggtggcaggcccagggagcctcacttgtatcccttgggactctcggctcctttccactggctggacctcggtgtggcatcccatggtgctgaagtagggaggcgggcagccctgggatcatgaagcacagctcaaggtgaagctcagggtcagtgtgcaagacagcagattccaaaccctttatttccctccatgcccctttctccatccctttaatcctctccacctgggccaaggcacaaagctcagaccctcagcatttctgaaatgcactagggtgtaaagagaatccactcctttctggccagtagctcattctgtcactgtctggtagccaggtctcatgacctttggtgggaaagtcagagaaaaccacctcctgtccctacccctccatcctgtctggtgcccagtgttggggaatggtgtcagagactggggggctgcagctcagattttgtttcctttctatacaggatgccatatggcacgctgtccctggggagaggactgacagtgctgtagttgccacttacccccttccccagaagtcggggctctgcactttcccctgggagctggaaaaagaccttgtcttcactgagcagctccttgcactgagttatgtttaacaatggtcagggaggggcctagatgttattaaccctttccacactgctcccctgactcagagggaacccaggctggatgctgcagagaaagattccaaaggccctttcttttccatactgaacacttgtttctccttggccagagcacaggtgcccttttgtcaggatttgggtcgggggtggggggcatgaaggcaaggggttggtggatcggggtgcttacgtattggctgggactccggaagaagtggcaggcgcagaggacctggcagcactgggggtcgcgctggtgcagcagcagcagcagcaggatggccatgatgaacactgtggatgaggctgccttcccccaagaggcaccgtcagggggcagcctggacccagcatgtgcaggcccatctcctcaccagattggaattcactccagaagctggtgtaggaatgacctggctggtactgataccagcttgacaagcaaggcaaactgaggtgcaggcagmatccctttttgctacggcatcaagtccctggggcagagatttgtgagggggagcagagtagccctgtcccttccctgcctgcagcccagggggtgatgtgtgtaagggagattttacagagacacaaagggaggggatggagcagataccctgagaaactggatctgaggaggcaggaaaggacccaagagcccagctcaacagctcctggtgcccagcccctcttgttaccaaagattgtggcatcataggacctggcacagggaagggaccagagggatcaaagaccagccatgtgcagcatacttctcaagtcttggctggggagggctgttgcttgaggtgaccctatagatgaagaatctgggctttgcctacagtgaggggccaaaggtgcctctgccccacccctgggacacggaatggcagtaggtactcactggtggccacgactatggccaggaggctgttgtccatggtgatgtctgcacacggagaagcagtggcaggggatgccaagaaagggcatcagycttgagggcagccagcagggccacagggctgaccctccccgaggtgccacacccctccctgggaaccctggcccagaggaacagcttcattcagagcaggggcatctgtaagcagctttccaggagctcagcctctcctgcctctgcaggcctggcagctatgagtgtcccactacaaccttcagagcaggggttgsggggaacaggccctgcttctgctgaacctgacagccagtgggactccaactcgcccagatctctgcacttctcagtcccagatccctcccagccccattgcccacctccacttcccattggctcagataactgggctctggatgttaattggctgtcttctggtcttggcttccacctctaacagaaccgtggtgtccatggttgccctggaaactgggtacgccaggccatgaaatacaaaagcctctctgcccrggctctcctcctccctccaaagcagttattgtgcagctctgggggcccagcctgcctttggccgctccccgyccccactctgtgtcctgcctggcccaaatcctgattttgaccccagtggcccagccaggagtggatttcaaagaaacctcaaaaaacccaagcctccaggctgagctaaccctacagaaaggtgggggatagagaacactgtctgccaggaactcaggcagcaaagctgagctctcacctcagtgacctggacaggggagagaatgggagaggagcacctccacccccaaatctgccctctgaacctgtcaggaggagtcctggaggctggtcctgggtcctgcagtgcttccaactcagtggggccaagacaggcctgccagagcagcaggggtggggttacgcttccctagttctgcctgcctgcttgttagaaaggcctgaggagctttaaaagcataccactgtgggttgccacctcagaccgttaaatcagaatcctctgtcaggatcacgactcacttgagttgaagaatgtaaactccaaatgtttacagcaggtgacaataatggggaactacgacctgatctaatatggtggtggagaaggacagggatgcggcgagtgcatgtgttacctaagatttttttttttttttaatggtactttgaggccaggagtagtggctgatgcctgtcatcccaacgctttgggaggttggagcgggaggactgcttgaggccaggagtttgagaccagcctgggcaacatggagagacccctgttctgccaataaataaataaataaataaataaataaataaataaataaataaataaataaataaataaataaagaatgcatgcatgccaggcatggtcgtgcacatctgtgaccctagctacttaggaggatcacttgcgctcaggaggtcaaggctgcagtgagctatgatcgtgatcgtgcctggacaacagagccagaccctgtctctaaaaatactactactactttgaaaaccgttgtgctagcctaacacagcacagccatagcccaggttaaacccacaggctagtttgtgagctcttggccagcagagtctaagtgttctaatatttactgcctgtgcctaatatgctgaacctagttgttaatttttcctccttattgacctgagagttgatattgggaaacaaaaaccacaacattctggagaaccagggtacagcttcagatgttcactaaaacaggagccagaaaaaacgaattatcttagcctctgaacctaagtaccttttccttcgaattcttgccattagctccttcctgcttacctgcccagccaggctcttatgcgagccggagagtgtagtgactgagtggctctggaggcttcctgcctctttctgaaggctgctgccaccatcaaatagttagctgtgactttgggctcgtcatttcacagctctaagcctcagttttctgatctgctaaatgatgataataaaaatgcctccctccaagagttgtaaggattgagatactacaggcatggttagcaccacggcagctgacaaaaaccccagtgctgttatcggttggttgtcaggagtgccccctcctggcaactaggagaacttgacatgtggcagcctgggcaggaatttgttccccaagctgagctcagtgtggctggctgatagggtgactttagaggtctagaaaccttcacccttgctcccacattaagcaagctgtgaaggactgataccgagctctggctgtcaatggtaggagagtgggagggggagaggaggcttgggaaagggagggaggatggacaacccttttcaacatgagtcctaggacagtgacgagggacctaggctgctgctgctcctgccccgaaaagaaaaagctccaatcataacgaccaggccatggctgggattgcctctgttgaaggtgccccatgtggcagggccaggcttctaggatggaccctgctaaggccaaggatagagaagccagcacctgctgcagcctggcctggtggtgggggtgggagtgctgggtcagggctctcaaactaagctcaggtcctgctggtcccctggcttgctgggtggcaaagaagaagtctttgagcctctctgggcctgtttacccctcagaaaaaggagctggattagatgttttttgagacagggtctcactctgtcacccaggctggagtgcagtggtgcaattttggctcactgcagcttcaaactcctgcttcagcctcctgagtagctgggactacagatgtgcgccaccacgcctggctaattaaaaaaaaattcttgtagagacgaggtctcactgtttcccaggctggtcccaaactcctgggctgaggtaatcttcctgcctcagcctcccagtgttgagatgacaggcgtgaacccctgcacccaggctagatgggttcttgagtccctctgggtggattctaaactgttcttaatctggaggaatgagatctttaccttctcaaggctaccaaagtaccagctaagacttctggagaaggcccaatgaatggtgatggcttcctgacacccaggaggaaaaacacagagcccagagtagagagatagagatatatttcttctgttgcatatttcagacttcacgctgagcttcaggcacaattactccaggttcttctgagagtcttgacagagtcttcttcccacgctgctcatgtgacctcacttccagtgcacacctggaaactctgcatgggtctcagtgggccctgaccctgcctttcccatccaggggcagggtatgctggaaagccctggagccgccccaccccacttctagggtcccctggctacaaaagaactgtcctgctagagcccagctctgcagcgcccccgatatcacctgttcttcgggccttagagcctggcagggcacttgcagccctgtggagcctcagccacgagcaccacaggcccagaatggggcatgaggccctggagagtgaggcaggcccagcctcgtgcagaacaatagcaggtgggctcagcaagcccctgctccccacagacatggcccacttcctggggctgctctgagccctattgcacatcttctgttctagtttctctcccaaccacccattttcctttttaaattaaaaaaaaaaaaaaaaaaagaaaaaaaagaaattcaaactagacaggaaggtgaggaagagctgggtgtggaatgctgctggtgcccttctcgcgttcccgccagccctctgatccccaacagagacatcagcagtagttcatactgtgtccaccttccctgccgtctgtgtgggttcttgatggctgaaatgggtgtgcagcctgggcctctggttcttgcctgtgggaggggacacccctccactgtctgtaaggtgcaatttcccgggtcctccacgggtactggctggggccctgctacctgagtcgcccgtctgctttgacaggccccagctctgatttggggtcgggggacagagagctccagctggtcagtctgcagggctccagggaggggcagggagaggggcctatggcacacagtccagccacggaccagaagctgctcagttccctgtctgtccaggcctcgagcgcagggcctgtgagctgtgtgtgccgctgggcagcctcctccgcgagctccggctgaggcaggttcaggatgctactcaggccctggaaactctgctccatgtactcgttgtggggtggccctgcgtgcagccagctggcatcatctgtgggtgcagagcaggcagtaagcacaccccctgcaacagactccgtggaggccagacccaggagttgggtctgggtaccccagttcctgtcacagccctacttctgagtcacagcttgctgaatgaccttgggctaatccaagggactttctgtgcctataaaactgagttttataaaatcaaggcagtaagccttagattcccaactttaggatgcagtaaagcagtgggttcaaggcactttagaaaagggaacagtctggtttgtgtcccataccctttcttgaccatcattggtggctcctagagccctcagaagcctgtactcgggcacttcagctcttcatgcacagacaatggccagctttgtccccttggcttagagcacctcctctgactttgtccttgaggcgcagcccctgtccctacctgctgtgcattgttgccattcttcccttgactgggaggtccaggtgtgcgggggacacagcttgcctgccctggatctgctgcagccccaccagcaccccctcctcctctagggtaccccacctcttaaccaccttcttgtgataggacgtggtgggggaaggaaacacctaccaattgatcacctcctgcataccggccactttccctccagaggctcatccctcatagctcccagggggagttacttatactaggccctcccttgcaggaaatttgcccagcctgtgtctctgttcagagcctgctcccttagcctcagccaaatgggcagagagccacatgaccctgcccacctggccagacagtggactgggatagccaatcagatttgctgtcccaagaatgtgaaacctggggactaaaagtctctggtcagtgtctgttgcactgagaggccatggatggggagccagagcctgaggccaatgcatagagacaggacaggatgaggaacaagatagccccagagagatggagaaagcacctctggttcacagtgaggcctgagacatttcctagctttgtgaaggagacctctgcattcttccagtcttctcccctttttaactcaagctaggttgagtggatttgtgttgcatgaaccaggaggtccctgataggtgtactattccagcttcacgtgctaagactgaggcccaggaaggccaggtaacttccaaggacaaaaagccaatgaacttgtgagagttatgttccaaaccaagtgtgcatgactgtaaagctcccttttccaccacactgcagtgcaggaccctgcatgctacaggaaagaagatgaaggccccagcccttccatgcttccctgactctagggatgggagtcagctctgatggttggcttcttgaggtcacctctctggcgagtcctattctgtctggcttctgggcctcatttgagaactgcacgcttacctttcctgagaggtagtttgcggttgaaggtcaagggcagcacaaggaagcgggtctcacccagcggttcccagaactgaaggagtcgaacagtccagggccctggccgcaggggccggctcagtgggggcttgtattgcgtgacctcagtctccgtatctactgtgatgtcataagatgtggccaccacataggttgggtcgatccagaccactgtggctgtgaggttggggccccgggcccagcgctgcacggccacaggctcgtccagcggccccagtaaccccccaaagttccggaaaagacgctctttggggtcccaatcagtgccaacctgtagagagagaggcagctgggcaggagtgtgggggaaaggtccttctccctcctctgaagctgcctctcactgtgtaatctcaggccagtcactgtctctttctgggcctcagtttccccatctgcaaaatgaaggggtcagactaggagacctttaatatctctcccagctctgagattcgttctaggcttccattctgactgctaggcagtggaggtcagtcccccttattggggacaatacggcagggatgaggttcaaagtcctgcccagagaccattcccacatgaagccaaagcctctgagaaagagactatgaggaggggccaggcgcggtggcttgcgcttgtattcccagcactctgggaggccgaggcgggtggatcacaaggtcaggagatcgagatcatcctggtcaacatggtgaaaccccgtctctattaaaaatacaaaaaaaaaaattagctgggcgtggtggcg

SEQ ID NO: 97058 - DNA, 31952 bp, Homo sapiens
gagaaacttccaagcgctctcgggcatcttggcggcatctctgggctggaggcagcaccgcttcgccaggggctatgggggagaagacaggcgggcagccattggtgctgggggccagagactgctcctttggggtggggaaactgaggcccagggactccccaggccgggcagcactgggaaggcctgtcccccatgcccacagccacctggagcataaacagagcccacaggcgcctgccaaggctaaacttagtgcccagctgtccggccgccgcggtgctgggaggggagtgaggggggaggccccgaggggagcaggagggctctgggggccagaagggggacacttgggcttacgatgagggagacggatggatgcgtcagcccaagggagttgggctggtgggggtgacccttgaagggaacatggagggggttatatgggggcatcttgggaaacacagagagccccatgggaccgacacagaggggagaggaagaacttgtgaggaagccgccccctcagtgggagattctggagaggctagagggctgggagagactagggggaaggtgtggcggggacatgggaacctgggggcgatgaaaggggaggaggggctggaggcagaaaaaggggacaggaggcggaaaaggtgtcacaggcgaggtgagaccctgaggggacattgggagtgcagaggaagctgctggctccaaggcaggggttggggagtgcggtgggtgggtgggtggcggggcgcggctccagagctgcccggccaagccccacccctggacaagtcccacccccttcccagaggctgagggggccggagcccagagcacccagcagttgtcatggagacagctggagccggctccggtaacccctggcaaccaggctgctgccaagaagatcagctttggaacacccggcagcccctccacccatttctgaggaagggcgagcctcgaaatggggcgagcaccccacccaaggggctggggagggcccccggggctcggccctggtagtctaccagccgccacatcctcctgtcccgcaggggtgggggacggcttgccctcctgggtctcgggcttcccagctggaaactgggaagaaggcaggggcaacaagcaggataaagaccactgcggacccagggaggggccctggacagccctgtctccccctcccacagtaggggtgtggctggggtctctccctcatgtgggtgatatggggacgggagtggggagagtggcagtcagacaacatcccatcatcgacctcacaagggccagcctcttcccggccagcagagaaaggcccctttgttggcgctgggcacattgtccctgcaccctccagccagacgggcggggtgacaccagctggtccacgggggtgtccaggccaagctaaaggcccaaacaccttccaaccagctcctgccacagcgacccctccccagggaagtgagtggggtcaggcgccaatgtcaccatcatggtcactctctcgcaggggcgatggtctccgcagaaactggggaattctgctgtcgcctcttggaggcagcacagtccaaccctgaagccccgggccatgtcacctccaagggagcgaccactggcgtggccagagcacccaggcccttgccatccctggtcggagggtggcgctgaccccagataggcacaaggcagcgaccgggcagctcctgcctcttcccgattacagcgggcaagccggccccgccgccgcacggacccagcagaaaacgggcagcggacctcgctccgggccggggcgcagcccgcatggcagggaggcgcatggcgcaggccgcggtgcgccgagccctcccgttcccggtcctgggcttctcagtgtctggctcggccctgccggaaagagcgcgcggtggccggagccatccaccgcgcggggccccctggtcccaaactgaccggaaagggccgtgcctcggtcccccacgtctcaaacatcccacctgtctcgggccccccatgtcccagactcaccccagcccggccacacccccgcatctacccggttcccccacgcagcactgtctgaagggggcgcgcggcggcccgagagaccttatcctggggctccaacgtcctgggcctctccagcccgaggcccccacccacgttccggcgaccccttcatccgcagcagccagcgctggaagaaaggaacgcgccggcggccccaggtccccggtcccggcttcccccagtccggggtcccctcgtcccggcccccggccacactgacccgaaagaggcgcgcagtggccgcggagcgcagggcggtccagcccagcgcgccgagcgccagcagcagcagctcgggcggcgccaggtgcgcgtgctcagccaggccgcgacgcgccagcccccagccgcagtccgtgcagccccgcgccgccgccagcgcgctgccccagccgcgctgcactagctgcgcgtagctcggcatgggctcgggccccgtcggccccgccgcgggccccgccgccgccataccgcccgctcgcccgccgtgcccgtcgcctgcgcccgcccgcggtagccgacggagccgcgcgccccgcgtcacgcgccgcagctgggccgggggcgcgcgggcgggagagcggagggcggaggggcgggaccggcgcaagctccgccccgctgggggcgcggctggggggcggccagcggggacgcggggcgccctggaggcgggcccgcgcccctgcccgtttcccagcagagaaacccaggcgcgggggccggagctgggggcccgttggacctggaccccgagagaccccgcgcaccgccgtgtcgcgcccccatgcctgccccgcgcgccccccgctcccccaccccaccgcgccgtgcccgtgacggggggcacgggggacactagcaggcagtcccctcgactggcgacccccgcttctcccggccctccagcacgccacgccgctcccgctccatcgccccggcccgctccgacctcaccgttcttggagccctcgctccttctcaaggacccgaggcctggcacgccttggcacagtcttgggaccatcccgtggccctcccgcattcaggaggcgtaggctcaatgaaacattctcattcttcaaaaggacacggcccacgccagggcgttgggaggcgcacctagtggagacgcagctctctgccctacaccaggagcttggcaatggggttccagcttggacgcgggtaccctgggcacttcccaggcatcttcttctgcaggtctgcacagcgggctactgggacaaaggtgtgatgggggctgctgagattagggggttctctgagggtcacttgctgctgtgaccctggggaacccgggggggggggctccccaacatcaggttaatacatgagttgcagagaggctgcaggagtgggtgccaacgtgggagggactcccaatctggatcgactgtgacatcattgggaccaccataagtgactttccaatgcactgttcattgacaaggccctgtgcccaaagccactgaaggccatcgaggaagacactggtcacctctgttaggaccgccatctccccaggcactgctgcaccccccctccatcctagcccgcaggatgtccccacacctggccttcaaggtgcaggatgcagggatgagtcctgcagcagccgcgctggctcccgaacacctgcacctgaacttcaggggcacaggtgaacacaccttccccttgccccacaccgagtcccccacaacacatccaggtggccctgcatctggccacttctctgcatctgcacagccttgccccccgctccccgccaccaccaccactaccaccactaccctcttccgtctggtatcctggcttcctcctcaccccacagaggtgagaaggtggctgcgacgctgttggcctgttcctcgtctgcttgcagccctctatggctcctgttccactcagggaaagcccaagtcctcactggctgccctcacagcgccctgtttccctccgcctgtgggcttttctgctgttcttccaacatgccaagctctgtcctgcctcagggcctttgcactagctgttcccccctcctgaaatgctgttcccctaggtacctgcatggctcttctgccacctgctcaggctgcccccgactctgaagtcacacgcccctcatgtcttcatgtctgcttggcacttgtcaccatctgcccctacatacatacagctcatttttttttttgagttggagtcttgctccgttgcccagactggagtgcagtggcgcaatctcagctgaccgcaacctccgcctcccaggttcaagggattctcctgcctcagtctcccgagtagctgggattacaggcgcctgctatcacacccagctaatctttgtattttctgtagagacagggttttgccatattggccgggctggtctcgaactcctgacctcaagtgatctgcctgtcttggcctcccaaagtgctgggattacaggcatgagccaccgtgcctggccccactctttattcttgaacgtggactccatgtggactaggggcctagtgtaggggtggggcacgaggcttggcctggccaatagttcaggtccagccggaggccagagatgtgactaacgccacaacctgcctggcaggcagagggggacgagggggatatgctctcaaaggtccagccaggcctgtggggcagccgtggacagtcccagccacctccctccaccctctcggccagcactatctggtcaccatggcgcccatcggtcacgggagaggcgccacccacccacccactagccccagctcagcctcgaatttctttttggcgggtccagccaggaggctgccaacgggtgggtgcagggcaggaatggaaggcggctctactggcagctggggaccaggcacccaaggctgggcggaggtcagtcttgaggccagtgtccccccacccaccccaaggtctcctccctccagaaagctcggcctggacccctcctaatgtccctgtccagggagtcctcttttgccacttccctcccctaccaggctgggggcgggggtcgcttgctgtcctgccctggcaaccagagacggggtctggtttcaaatgaataggcctgggtgtggcttggggaaacccagtcttatcttttccctgggagataagcccaggccaggctcagaggtcaaagggcatgcatccccatccagcgccccttgacctcacagccctgtgccaccgagggacctctgcaccggtcatgcccactgccagggtgcctgtccccctagaacctagcctggcagctcctttttgttgttcgggtgggcacagctcaatggtgacatctgggaggctccggccagccctgctgccacccacccacctccctccctaaatggtgcggccgcctctcatcgcggctgggtgcttggccccaggaccctgccacagcaggactctgccttggaggagggtttgcggggcggcaggagcagcacctggggttaacgctgaccctgcagggcccctccggctttgctgagctgaggcctgagtttttcctgccctggcccccacttcctccaggccactaggggttctcattttgaatcttggtgcccctcatgatagcggcatgacttctctgtgcctcagtttcccccgatgccaaccagggctgctcagtggcctctaggggccagggtgaagcatggggacagggctgtgctgcctctggcctgcaggagcaggttgtggctgtgtgaggggcggggtgggggtctgcacacctgctgctcgtcacagaccctggtctccaggaacagccctggatgccagtgccccaggactctccctgagcgtcagctcccacacgcccccagcaaagtgaccagagcacatcatcaggtggaacaccctggagttgagatatttattaacagatgggggtgctgggggtgggctcctgcccccaraggggatgcaggtggatgccgggtggggagggctgcagggctggctcctggcctctgtcctggcttcatggtcctgacagctctgggccagcctcaggcgctgggagcgtactgtagcaccagcctgtcaaagtcgttctcctttagcaagacacatggcaacacagggtgggggcagggtgtggggagacaggtggagggagagagagagggcgcatgtgagcccaggctgagctccaggcgccccctggcctggttctcggggacaggccatccccaccactcaccttggcctggtactccttgatgaagggatgggacctgtgggcatccttcagctgggacaggtatcggtttgtcacctgcaggggaggcagggaggcaggtgagccgaacacggggaccccacggtggctctgacctgctggacaggggtggattggggtgagagccacagtaccccagggggctcctcaccctgccttgggactgggctgatctcggagaaccttcagggtgggggtggagggatgggcctgccccctggagaggcrctggcatggagctggcctccgtacatggtgggggatgtattgtggtgttcaggggagcaggtcgggcagggccccaggtgaggatgggttggggggcacagggtttgtgagggaggtgggctgcggtaggcatactgtatacagagttttcccaggggcctagggattagggcctggaccccaggctggggtcccagggtctggacattagggttggcctggagccctgggggccgcttacctcagggggcttgcccaggtgctgggacaggacgatgaggttgaccagcgtctcygggtagccactatcctggagacacaggcagacacggggaggcagggtcagccactccagcccccatgcctgcccgtcacccccacctcaggcagcaccacacaaggtcacctcctcagaggtggggtgggactgacaccgcccaccgctctgcaaggtggagatctcagatgatacggtgccaaggggccagccgcctcgctgagcctcagtttccccatctgtagtccagcctggggtacgaccccttgtttacagagacttgggaaggttgtatttgtcccacacatctcaaagccatggggcccagacccagatggcctcaactcctgctgtacaacgaaccccgaggccatgggcagacctgccacccctgcaccagctcccaaggagccttgaaggagacctcggcaggggaccttgcctgactcactcactctaggctcccagcacacaggaccctaggaaacatctaggccaggagacccagccagagccctggtgtctgcttggagcacagacacaccaacsaggatgcgcccagagcccgacctgcccacggcggcccatggcagggcacctttttgcagaccggacttttctgagcctcagtctccaccatgaagggggacaccagcttgcgctcacaggagcagccatgaggtggctccaaagggaagtggggggacctgagtgcctcccaaaacccagcaagaatgcagggtgaccacagccacggggaggccaccagggccaaggggcacggccagccagccccaggtggtgtttcaagagacaaggacagaagggagtcatctaactggtgagtcacggaacgtgtcacctgagaggtgtaacaaaagcccccagaggatgcggccatgaacacaacatgcatccaagtgttctcaggtggcagggaggggcagggtggtggaggagggcgccagtcttgcccctggggcagcgagggacacacagcctgtctgagattgcacatcaggctgggagttcctgactagccctgactgctcagagctaaagatggaccctgctcaggaggagcagtacccggcctgtgatggggccagcctgataccccttggccagccccgctctgcaaacaactttctgatgataactcagcccctggaaagtcagacagggaggagggcttcaccagtgtttgtcactagattaaaactgtttctcagctgggcgcactggcgcatgtctatcatcccagcwctttagaaggccaaggagggtgagaattgtttgagcccaggagttcaagactaacctggacaacacagtgagaccccatttctaacaaaaaatacaaaaattagccacgcatggtggcataccgtttcaaaaaacaaacaaaaaaccccccaaaattcgtttctccaaaatggaaaaagctttgatgtcctttctgattataaaaataataatccaggctgggcacagtggctcacgcctgtaatccagtactttgggagtccaaggtgggcagcatcatgaggtcaggagattgagaccatcctggctaacacagcaaaaccccatctctactaaaaatacaaaaaattagctgggcatggtggtgggcgcctgtagtcccagctactcgggaggctgaggcaggagaatggcatgaacccaggaggcagagcttgcagtgagccgagatcacaccactgcactccagcctgggcgacagagcaagactccatctcaaaaaaaaaaaaaaaaaaaatccaccaagcatggtggctcacacctataatcctaatgctttgggaggctgaggtgggacgatcacttgaggccaggagttcgagaccaacctgggcaacacagcaagaacaaccccgtctttacaaaatatatatatatttttaatttaacataacataaactcttcataaagactgcagatggccaggcgtggtggctcacgcctataatcccagcactttgggaggctgaggcgggtggatcacctgaggtcaggagtttgagaccagcctgaccaacatggcaaaaccccgtctctactaaaaatacaaaaattagccaggcgtggtggcagccgcctgtaatcccagctacttgggaggctgaggcaaaagaatcacttgaacccaggaggcggaggttgcattgagctgagatcacaccactgcactgcagcctgggtgacagagtgagactccatctcaaaaaaaaaaaaaaagaagaaaggaaaggaaggaaaggaaggaaaggaaggaaaggaaaggaaggaaaggaaggaaaggaaggaaaggaaggaaggaaggaagggaaagaaggaaggaaggaaggaaggaaggaaggaaggaaggaaggaaggaaggaaggaagaaaagactgcagacatcaggcaggagatgactgcagccaccctgggcaggcagcgctctctcaacgaagagctcctgtccacagcacactctcccctacataagtacggggagtgtctctccaatactgagtatgtactcaggtgaggggtcccacttgcaggtcccgggccaggcagctgaggtgacaacaaggacggctcagaccactgaggcccaggctgcccagatgccccatttctgtgaggccggaatctggatttctttgcaggtgagatccctgctttgtggatctcgctgctgactgggccttagaagccctgtggggccacacgcacacccagggggtctctgctacacttgtttctgtccgccctgaccccaccctctggccgcctggccttccctccgtccccactctgggacaggcttgtgcctaccttgtctagcgcctcctgcagcaggccctcagcggcctcccagcggccctgggccatgtggcaggccgcctgcccattgagcagcagcagggtgggcgagcacttgtcagccatctcctggaagatgtagtaggcatcctgcagcttctcaccaccctgcagggagggtccygcatcattgcctgtgcccctgctgcccggcccttcccccgccagccccctcccctagcgggggggactccagcactgcacagagacgaatctggtgtgcccggttcaaggcacagccactccgccatggggactacccgtaacttgtactctgctgatggggcctaaagactcgtggccgcctcctgccccacctcccacccagctcccggagtgctgagtacacagaggtggaatctggggcttccaaggcctcagtgcacaggtggctggctcagggtctgagtggggaccactgggtcactgagcacgtcagaggaggaggagtcagctctgtgaccagcagccctgacctgtccacttgctcagaacagcagaacacttgcagggggagcctgaggccaaggcaggcagtgaaaacagcccaaactacccgataggtctgccggggcctgtcctaccatactagacggtcactggaagtctgtctgggtgaggcttcagccccgtggcaggcagggacggggagcacatttttttttctttctcagagtttcactcctgttgctcaggcaggagtgcactggcgcgatcttggctcaccgcaacctccacctcccgggttcaagcgattctcctgcctcagcctcctgagtagctgggtttacaggtgcatggcaccaagcccagctaattttgtatttttggtaaagatggggtttctccatgttggtcaggctggtctagaactcccaacctcacatgatccacccgcctcggcctcccgaagtgctgggattacaggcgtgagccactgcgaccagccaggaagcacattttaataggcccacacaaaagagtggctcagaagggggccaagtcccagaaaccaggagaggggctgttgccgggcggaggtgcccaggcctgggagctgaggacatctccaccgctgctatgggaacactgaactccgtccctggctggcgaccaggaccctggagagcaaagctgagtcgcagaaaaccccaggaagccctgaggggaggagggcctgccaggccaacccagaccctcgagtacccctgtgcctcaggctcaggaacccgtccccgcccccaccatctcttcgctctggctctggccaagtcgcttggctgtgagaagcccggaatggagtcaaggctgagttatgccaggctggcaggggccacggcctgatcctggagccccactggagtggycagcagcctacgcacaggtgggggtgcccacagaccctgctcagccaggtgccygcaatgcccacccacctcatggcctagggctcaccgtggccaggctgacccaggcagtggcgagctgggtgagggtggcatcctcgtccaggtcctgcattctcttcagctccttcctggggcggggacagatgacagaggggctgagtggccgagggccctggcctggccatccctgccttgtccccacttggggcccaccggagcctggggatggcccctgctttgtgctccactgcatgctcataccccacgactaagtgcccgagccaccctgcccgtctgaccacgtgcaggccctgggaaggtgggactggggccagctatggccccccagggtggccaccacaaggtagagctcaggagagactcactccatggaggatggaacgcagggaagggcaacggaactacagtgtgaacaactctgaggcaagggctttggaaacggcagcaggggagtcctggacccccagccatggcctccgacctggtgatgccacgtgcaggccccgccagccccacggcacagttacaagctggtcaagtaacatgttgctccrggcacaacctccactctccctccatgaagcccaccctcaccctgtgggagaggcctgccacccactgcatagagagaaactgaggcacagagagccatggccctcctccctggcaacatactgcagggaagggctgaacgacagcaagccacccccatggaaaggaaagacaacargagtaatgacagcaccacagacgctctgggctgtgacgctctgggctgtgacgctctgggctgtggctcagtgcgggtggagaggggcaggagggctcaccgggcgaggtccaggcggtccagcttcagcaggatctgcactgtcatggctgtgctgcaggacagrgcgagggggcggtcagcgggtcgccacagacacattgcatggccgctccacacccagggctcactgtgtgtgtctgggatgttcctaagtcctgtgcttaggaccaccagccccgcccagcagaggaggacaccctcactcccacatttcaccgctcagcttcctcaggcccaggagctctgggggaggtacccaggatggggtttcaggccccggcccactcaccgcccatctggagaagcagcctccatgggctgtgcttccagatggagggccctgcccggactcgacaccctggaggcatcaacactcaggaacaaggccctagaggagggccacgcacccgcccctgcacctgcacctgcagcagagccctggggccacccactctctgcaggccccctcgtcccctcatccctctcagccccaggtggctgtgaccacgaattactcgtgaggcctcttgttcttgttttcctgccaacaggagccagcacctggaccagcaccgagtcggccggctcgccgacagtgtgacatccctatttattttcttttttgtgtgtgagtcagggtctggctctgccacccaggctggagtgcagtggcaccatcacggctcactgcagcctccacctcccagactcaagggatactcctgcttccgcctcccaagtagctggaaacataggtgcatgtcaccatgcctggctcgccctgcaattctaagccctctgtggatggaggtgggatgggagcagatccacagcgaccatgaaatgcccagcttgcaactcacagtggaaggcaggcactgcagggacagctcacggggaagaactgacacactttctgtgaccagtgccctggacatggcccggagtcacatcctagggtggaggggggcaccaaccttgcagggcttcagcaccccaaccccagagggccctggaggagggccggtatggggggcccggggaggcctgagagactgggcccagggccgagacacagaaggcttcgtggggggtggggacacagaaaccgagcagagacaaagccgctttctgctctgcccttgggaacagagggttgcagcctgggcaccgtgtccttggatcygcagcctggtgcgcagatgggagtgcctcccacactgggcaggggagctggagcctggacagcaggccagggcctcatttcagcaccacctttctctgctcccatgacgacagccagcgaggccgtgcgcagcctggaratgtggcagggggcacttgcctccctgggctggccccagagcagggaggccactcaccactccagrctgtccccctggtgcagcgcacgcagggcggcatccgggttctggtcgtggagatagatggaggcggccatgagcaggaaggtgrtgttggtcacgtccacgctcctgctcatctctcggtccagctcggccacgatgctgtccctgcaagacagagatgctcacgacccacagctggggtggcctctgtgggacctcagagggtccccttccttggaagcasacaggtccagagagggtgagccaggccctgggggtgcagagcagcagcaggccgagcatcgagctgtcccgacatgtcctccctccgttcctatgaagcacctctcatgctgggccaggcaaggacccgaggccgggagatgtggggtggggcgctccaaggggacatgaggaggcaccgtcagtctcacaccaacctcacccgccttcctgaggaggctggtgggcccagctgggactcctgaccataacccatcaaccctgtgggcttcaaggccacgtcttctagcaggaggtcggcctgggtgccgaggggccgtgcagaaggatgggagccctggggcacccccactgccagggcagctgccctcagtccctgagagcccagggtgctggctgcaccctgaagatggccagtgtgctgcgggccagggccaggcttgagcccaggcaaggctgaggaccggctcagctccgagggcacaggtcacccatgcctccatgtccctaactggacccagaccctccattccccatggctattgagcagctaaaaagagaaggcaggtgagggggccaccctagaccaaagctggtgttcttctgggttcaaacgtggctctgtgaccccgtaagcatccacgcgcatctgggggctgtctgcccagggcccgtgtctgaggtgtcactgagggcatggcatgtctgataccaaccaggctccactgagggctcgccacagtgccaggtccaacagacaagtgacttcaggtctgagtctgtttccccgtgctgagggaccatgttacagggatcatgcaggggaggagcaaggagctcccaagaccatcttacaaagcttcctgrggctccagcacacaagggtgtataaacactgccagttgtcgtagcgttggtactgtaatgttgtcatcctaaggtgttacaattaccaatggggccgggtactgtggctcacacctgtaaccccagcgctttgggaggccaaggcaggatcgcttaagcccaggagttcaagaccaccctgggcaacatagtaggacccctttttctacaaaaaagtaagaaagtcagctgggcctggtggcgcctgtagtcccaactacttgggaggctgaggcaggaggatggcttcagcccgggaggttgaagctgcggtgagctgtggtcacacctctgcactccagcctgggtgacagagggagaccatctcaaaaacaagcaacagcaacaaaatcaattactgggcggatcgcttgagcccaggagtttgagaccagcctgggcaacatggcaaaaccccatctctctttttttttttttgagacggagtctcgcactttcgcccaggctggagtgcagtggtgcgatcttggctcactgcaagctccgcctcccgggttcatgccattctcccgcctcagcctcccgagtagctgggactacaggcacccgccaccatgcccggctaattttttttgtatttttagtagagatggggtttcacgtgttagccaggatggtctccatctcctgacctcgtgatccgcccgcctcggcctcccaaagtgctgggattacaggtgtgagccactgcgcccggccaggcaaaaccccatctctaaaaaatatacaaattagccaggcatggtgatgcgtgcctgtagtcccagctattcgggaggctgaggtgggatgatcacttgagcctgggagatcaaggctgcagtaagccaagattgtgccactgtatgccaggctgaacgacagagcaagaccgtatctcaagaaaacaaaatcaaaaccaaaaccaattactaatggatgctccttgtccccggggcgtcctgccaatgaggtcgcggctgtgcagccagatgaacggaccacaagcccctgcctggaccgcctgctctccggggctgcttttctgtgatgctcacagcagctgctgctcctgggggacccagggttccctgccttcactccagctggtgaagtaagtgcagggtgggagaaacagtggccctgggaggtcacctgtctcaatgtcctggagctgctgtggcaaagcaccacagcccgggcagttaaggacaacagggattcgttcctcacagctctggaggccgtaagtctgaagtcaaggtggcggcagggctggctccagctggaggctggagggcaaggccgtcccaggcctctctcccagctctggtggctgctggccactcgtggtgctccttggctagcagacatgtcactccagtctgttgtcacatgggcttaactctgtgggcctctttcctttttttttttttttttttaagacagtctcccgctgtcacccaggctggagtgcactagtgcgatcttggctcactgcaacctctgcctgccaggttcaagcgattctcctgcctcagcctcccaagtagctggaatcacagacatcacatcctgttaattctgtatttttaatagaaatggggtttcaccacgttggccaggctggtcttgaaaactcctgacctcaggtgatctgcccacctcgtcctcccaaagtgctgggattacaagtatgagccactgcacccagccctccttttatctcttaaaaggacacaagtccttggctttggggcccaccctaaatccagcatgtcttcatctccttatctcttaatctgatcggcaaagaccctttttccaaatgatatcatattcacaagcatgtgggataggatatggacgtaccttttgggggacaccattcaccccaccatgctgcctctgcacaggagtcagctcccaggaaccccaggtttctttgagtgaagggaggcggtagttgggacactgcctccgtgggccaaggaagagcaggatcacagcagtctccccatgccagaccctcactccgaccccacagcaggagggggcaaggttcctgggtccccacagcccagccccctctccccytggctgccgcccatgggcgtttgaccaacgctggcctgtggctcaggggcaggacaggcgtggcctcacccaccctcccactgggctccaggggagatactggcaggttgcagtccccaactagctgggactagaaaactgataggatttgggaggctgaggtgggcagaccgcctgagctcaggagttcgagaccaccctgggcaacacggtgaaacccagtctctgctaaaatacaaaaattagctggacgtggtggcacgcagctatagtcgtagctactcaggaggctgaggcacaagaatcacttgaacccaggaggcagaggttgcagtgagccgagatctcaccactgcaactccagcctggtgacagagtgagactccatctctaaataaataaataagaaaactgatgggagggccctgcccccgctgcgccctgggctgtcttggggctctgggtgttgcagagggctgctcggtaattgatattttcagttctaggttcagagagtgccttgtggtccatgagggcgtgtgcacacacagcactgtctctgaccctcccctttgaagcaggatccatcaccagccccccactgctgtgcaggtgagggaaactgaggcacaaagcagcaggggagcagaggggagaggcgcctaatctgagggatgctgtgcgctgcacgccatgcccccacccacccaggttcataaccaacaggccttgaagatggccccgcgcctcaggccaacccattctctggggcctcacctccgactctcgtgggcgaggtagtcagcaaacatgygcacggcctggagctcaggggccgargagggcttgatctcatccaggaccacaccgaacttcctctgcagtagggacgaggcgtcagctgcacccgtccaccccagaggatttccatgtcttcagcttggcagggagagccccagacaggaagyccctgccccaccagggacccctcagcccagcatgggmcacctccactgcagtacactgtggagggtggcatggcgtcacctgtcgtgagcagccaggtgtgccctcatctgcagggccacactgcccatgccttgagctagggaccctggtaggttactgtctatcccctggcagctgtccacctctggtggtgaggtgaagggcgtgtcacctgggggcagggcagcagcagttatgggggttgtgacatgcgcttctataaagcaggacatgcccccagccagccctgcccacctactggccctctgaggatgcccagactgataccactgtcacatctgcagctgggggcccgtccctcattgtgttccctcctagatggttccttccccatttttttttttttcgagacggagtctcgctctgtcgcccaggctggagtgcagtggcgtgatctcggctcactgcaagctccacctcccaggttcacaccattctcctgcctcagcctcccgagtagctgagactacaggcgcccgccaccacgcccggctaatttttttgtatttttagtagagacggggtttcactgtgttagccaggatggtctcaatctcctgaccttgtgatccacccaccttggcctcccaaaatgctgggattacaggtgtgagccaccacgcccggccttttttttttttttttgagatggagtttcgctcttggtgcccaggctggagtgtaatgctgtgacctcagctcaccgaaacctctgcctcccaggttcaagtaattctcctgcctcagcctcccaagtagctgggattacaggcatgcaccaccacacctggctaattctgtatttttagtagagacagggtttctccatgttgaggctggtctcgaactcctgacctcaggtgatctgcccgccttggcctcccaaagtgctgggattacaggcgtgaaccaccgggcccagcccccattcttatttttttagagacaaggtcttgctatgttgtccaggctggagtgcaatggcgtgatcacggctcactgtaatcttgacctcctgggctcaactgatcctcctgccacagcctcccaattagctgggactccaggcacatgccaccatgactgtcttattttttaatttttttttgtagagacgggggtctcactatgttgcccaggctggtcttgaactcctggcttcaagtgatcctcccacctcagcctcccaaagattacaggtgtgagccactgtgcctggctcctaccaattattttaggaaaaaaaaaaaaatcggctgggcgcgttggctcacgcctgtaatctcagcactttgggaggctgaggcaggtggatcatgaagtcaggagttcaagaccaccctggctaatgtggtgaaaccacgtgtttattaaaaatataaaaattagccaggcgtggtggcgcacgcctgtagtcccagctacttgggaggctgagacaggagaatcacttgaacccaggagacggaggttgcagtgagctgagatcgagtacgacagagtgagactccgtctcaaaaaaaaaaaaaaaaaaatcaagaagctgtgacccaggccccctggcctggcagtctcaggcctccgtgacacagccaccttcacatgctggctgcgctggctgttcacagtcactgaacactgcaggcctgggtccctgctttgtttactgtccccgccacccactctgtggtgccttcctgtccccagccccaccctctactctgttcatcactcttgcccccggccaaggcccgcactcacctgcgccaggtacgctctatacaggaagacgtccctctccacgtctctctctgggcttgayagctgtgggaaccaatgtgagtcaggaygcacagtgggaggcccagcgcagcccacacagggtsagcatgacagacaggcccctgtacactggggacaggtggcttctcyggcagggttggaggtctgagtcccagccctgatcctccgtagcccgagtggcctctgctgggggtaccctacacggggggtgcctgatctcatcccgcgctgacaccaccccaggaaggaggcttgctcccaagttcagtgtctgccccagtcacacttaagaagccagggtggcacccgcacctctaacctctggacatggggccactgtggcttgattctgttctgcttttgtctcaagacattttgagctcagtttggctgccccagtgtggtgacatctgtgcccagccctggccaggggagaccctgggaatggctctgtacttgggccacacccccacagcccagccattgcacagaactgaggagcaagagggaggtaacctgtggcaacatccattttgggatgataatgaagctgcccctgagcccaggccagggagggaggctgggrccgctctccagaacacagctttgcatgctgcccccggaggctggctgacttcccagggtgcccatggcaggtgggcacagtgcagctcagcccatggcctgagggtgctcgcccaggcccctgggggcttcgagaggaaagtacagttgggaaggggcccagccaccttggcatcgccactccaacaacctctaaacagaggggactgagaaggctgtcagcaagagggcctgccagctgtcaaggcacagggtcaaaggacccagtgcccaaaccagggggagtcactctgccctgtcctctgaagccgagaaccacagattccaagccacatctcttccttctccccagcctgagggaggagcgtggatgtcaaacgtgtcctcatcccaggccgccgcagacctggccccagcctgactcaggctgccattgccaagaggacccagcagcttctgctcaggccctggtagccagagtgggtatctggctatgatttggaacaagatgccatctaaataaataactcctagaagaatgtcaaaggcatgcggagggtggtggctgcagaaatcgagccccacctgcaaatgggatggacaggtgaaatatgtaccttttcaagtatgcaaagaaacatattataggccgggcatggtagctcatgcctgtaatcccagcactttgggaggccgaagtgggtggatcattagaggtcaggagttccagaccagcctggccaacatggtgaaaccccgcctctacttaaaaatacaaaaattagccaggtgtggtggcgggcgcctataatcccagctactcaggaggctgaggcaagagaatcacttgaacccgggagatagaggctgtagtaagccgagatcacgccattgcactccagcctaggtgacagagcaagactccatctcaataaaaaataaataagtaactctcaatcaaccttctgaggtggacttcagttaggtgactagcccagggccacatgccaccctcagttaaaaaagacaggccaggtgtggtggctcacacctgtaaacccagtgctttgggaggccaaagcaggagcactgcttgagcccaggagtttgagaccagcataggcaacatagcaaaaagcatagtcttttttttttttttttttttgatggagtcttgctctgtcacccaggttggagtgcagtggcgtgtatctcggctcactacaacctctgccgcctgggttcaagagatttttctgcctcagtctcccgagtagccgcgactatatgtatttttagtagagatggggtttcaccatattggccaggctggtcttgaactcctgaccttgtgaaccagccgcctcggcctcccaaagtgctgggattacaggcatgagccaccgtgcccggtctgagaccctgtgtccataaaaaaattataaatattagccaggtgtggtagcatgcacctgtagtcccagcgactcaggaggttcatgaaggaggatcgcttgagcctgggaggtcgaggctacagtggactatgatcatgccactgcactgcactctggcctgggtgacagagtgagaccctgtctatctttagggaaaaaaaagagacaaaagctggctgttgggctttcaaagtgaggacacagtggggcgccatcgggggcaccagggtggcctcagccgcccctgtgtgaaatgcaggtgcccaggagactgtgcgtgcggaagtgctcagaggctgcagagtgcactggagagacaagagtgccgggaagcataacaacaacaaatgtgcagaccgtgaccctgacgtgaggctctggaaccgttgtggttttcctcgacttccagggacgatcctaccatcaggacgcatgtgtgtccccggggtgggagagcattgctcttcaaccccaagggctcactacgatcacctgggagcccaggaaccaccaaagccaggaggccacatccaccaaggtcacctggccctaggatggccccagcactggccccaggtggcttaagatgtggccatggttgaggaatcagggtactgtttgggaaggcgggtgacaggatgggggccctgtagccagaaaccttgggggtagtaactcctcccttctgtccctgtagccagtgatctgaccgcactgggccgtcagcaactcaaggcctatgagctgcttcaaccccaacagctgggcggtgcctgccatcttgtgggcaaactggcaaatgtcagaaacccagaaacgtcatgatggtagcctagtgctgggggcagcaaagggcaaagactgccaggtgctctccctggggccacctcaggtggggctgaggttgctcaggccactgtcatgaactaccacagaccagatggcttaaaaaatgtattcctcaaaaattagccaggtgtggtggcgcacgcctgtaatcccacctactcgggaggctgaggcaggagaatcgcttgaacccaggaggcagaggttgtggtgagctgagatcatgccactacactccagcctgggcaacagagcaagactccatctcaaaaacaaaaaaacaaaaattagctgggcgtggtggcaggcacctgtaatcccagctactctgaaggctgaggcaggagaatggtgtgaacccaggaggcggaggatgcagtgagctgagattgtgccactgcactccagcctgggtgacagagttagactctgtctcaaaaaaaaaaagtattcctggccaggcgtggtggctcacacctgtaatcccagcactgtgggaggctgaggcgggcagatcacttgaggtcaagagttcgagatcagcctgaccaacatgataaaaccctgtctctactaaaaatacaaaaattaggccaggaacggtaactcatgcctataatcccagcactttgggaggctgaggcaggcggatcatgaggtcaggagttacagacgagcctggccaacacagtgaaaccccatcactaggaaaaatacaaaaattagctgggtgtggtggcacacgcctgtagtcccagctactagggaggctgaggcaggagaactgcttgaacccgggaggcagaggttgtggtgagctgagatcgtgccactgcactccagcctgggcaacagggcaagactccatctcaaaaacaaaaaaacaaaaaaaaaattagctgggtgtggtggtgggcacctgtaatcctagccacttgggaggctgaggcaggacaatcgcttgaacccaggaggaggaggatgccactgcactccagcctgggtgacacagagtgagatcctgtctcaaaaaaaaaaaaaaaaaaaaaaaaagtattccttcacagtcacagtcctggaggccagaagtcccaaatcaaggtgtcagcagggccacactccttccaaaggctctaggggaggatacttccctgcctctcccagcttttggtgactgttacattcctcagtttgtagccacattactcccatctctgcttccatcatctctgtgtctcaaatctccctctgcctttttttttttctttttccagtggcgggttctggtgaagacaagaaagcctactagaaacattctttttttctttttttttttttttttttgagatagggtctcacttttgacatagtaagagcaccaacatctcagacaaacactgccactttaagttccagccccctttctagcctcatgaattttaaggaaatttcttttttctttttttttaatagagaagtctcgctcttgttccccaggcttgaatgcaatggctggatcttggctcactgcaacctccacctcctgggttcaaacgattctcctgcctctgcctcccaagtagctgggattaaggtgcctgccaccatgcccggctaatttttgtattttttagtagagacggggtttcaccaagttggtcaggctggtctcgaactcctgacctcaggtgatccgcccgcctcccaaagtgctggaattacaggtgtgaaccaccgcgcccggccaggaaatcacttctaactacaagcagccagaaagaggagacagtaaaacacagaaagacagctcggacagagagagagtgggaagaaaatttcttgggtaactgccaaacttcaccttcatacaacgggccccagtaaaacagtgggccttaataagcacattcctttcccttcaggtgcactaaaataggcaagctaaaagcagagtaggggggtatgcctgcagctgcagaaagatgtatgggaggctgggcacggtggctcacacctgtaatcccaacactttggtaggccaaggcgggcagatcacaaggtcaagagatggagaccatcctggccaacatggtgaaaccccgtctctactaaaaatacaaaaattagccgggccatggtggcgcgcgcctgtaatcccagctactcgagaggctgagaaaggagaattgcttgaacctgggggcggaggttgcagtgagccgagatcacgccactgcactccagcctggcaacagcgcgagtctccatctcaaaaaaaaaaaaaaaagaaaagaaaagaaaagaaaaaagaaagatgtatgggaacagacacacaactctccctcccagataagcacaacgaagagacacagaagcagttcaagcctctgataaactctccgaccctgaatccttaaaaactcttagtctgtaaaagagtgttactctgacccaactccgccagaaggcgcctctcaggtttgttttctctaaaataaacctgtcttgactggcaagccacctttcgtgtttctttcctctttaattcttacaactttgtcacccaggctggagtgcagtggcgcgatctcggttcactgcaacctcggcctccgggttgaagcgattctcctgtctcagcctcccggtagctgagattacaagtgcccgccaccacgcccggctaatttttggtagactcatggtttctccacgttgcccaagctggtctcgaactcctgggcgcatgcgatctgcccgcctcggcctcccaaagcgccagaattacaggcgtttgagccactgcgctgggaaactgtgtttatcattctgagtccagcggaatacagtgcccgtccaaaaaagtgctcaatgaagaatgaatgaatgaatgggtaagctctgggagaaataaccaggctggttgggcagggaaacgtccttctctgaactttagggttctcatccgtaaaatgaggataagcaacagtctccatctcacgggaactgaaggtatggctgaacaaaataggcttattgtcactacagtggcataaacacctcccttactcaaaacactttcaagggcgcagagagaacgctgtacgagtgagcagtaccgtaaactgttactgctctgggttctgtcacgggacagtgactactcctcactgaactgtggaagaggtggcccaaaaaacgcgagaakwaaagagaaagtttttagacgcaraacgcggctcgcggccaccagaaagcgtcctccgcctccgcccccagcgtccccgcgcccctgcgcggccgcaccttcacccgctgcgcctcgtttatgcactgctggtagctgccgatgtagaaggcgttctttacgtcgaacagctcgtctacctccccgsagccgccrgaggccgggccgggggccggaggcgccatttmgctgtcttctcaccagctcctcttcctgaaagacacgtcagccggaagcaagacacgggcacgctaggaaatgtagtttactttttccgagcggcggcgaagtaagccaatgggaagctccacaataatatgcaagggggcggaaggcgtaagtgcgtcacggagagcatctcgggaattgtagtgtgtttctgcaagccaatgggatccggggaaacatgataaggatgcggtcgaggctgggaataggctgagggagctggagagggtgggaccacgcaggaggcagatccaataaacaggaagatttttctcgtgacgtcgtcggcgcgcgccggaagcgcggatcacacgggcccctacaaggggcccctacaagcggccacaaggatggcaggcttcgcggagctcgggctgtcatcgtggctcgtggaacaatgtcggcagctgggtttgaagcagcccacgcccgtgcagctcggctgcatccccgccatcctggagggtgagtatggcccagggccttccccaagaggcctctccgctcctctcgactcctttcccttctcgcaacctttgcttattccggtcccacgaggcgaggggcaacctcgggcgttacaggagatccggggttccggaggacgactggacagtgttggcatttaggttgcatgactgactcgctttgtgttcgtacgcaagtgatgtaatctctgaaattttcatagtctcagcacagggagggtttgatggatgactagtccgatagtatcgcaaaatcctgcagacctggtactgctatctttattttacaaatagaagttgaggctgtcaaaattgctggtagatccaggactccttggtcctgtgattgctcctctaggagaaggtcttctctctgctcctctagcccaacccagtttcgccattaaagagaggcccacaggaagcctaagatgtgataagtcagggattaaataaacaaatgaaggggtcaacagggagcacaagatgcatatgagggaagggaattctggattccccaaattcacgtgctcctggacggagttagaacgaggtggtaggaagctgtgggcatctcgggtcaaatggatatgggttccagtccagcctgccactcactggcagtgtgtcctgggcaaggtctctgaaacccagctgtccacacatggagggtgttgatgctgctttgtccccaacccaggtcgagactgcttgggctgtgctaagacaggcagtgggaagacagcagcgtttgtccttcccatcttgcagaagctgtctgaggatccctatggcatcttctgcctcgtcctgacacccaccaggtaagcccccagcaggcctcctgggtatgggttaaccagctgtgctctcttgggcaagcacctttccctctctgagcgcccttttcccacgtgtgagatgagcatgaaaatcttgctacccgcttcttaggggtcctgcagaattaaacaagatggccccggtgcagtggctcacacctgtaatcccagcactttgggagctccaggtgagcggatcacttgaggccaggagtttgagaccagcctgaccaacatggagaaaccccgtctctactaaaaatacaaaaaattagctgggcatggtagcgcatgccgtaatcccagctactcgggaggccgaggcaggagaatcgcttgaacccaggaggcggaggttgcggtgagccaagatcgtgccattgcactccagcctgggcaacaagagcaaaactctgtctcaaaaaaaaaaaaaagaaagaaagaaagaggcaggcagcagaaagggtactgggacctgggcatattggagccagtttgagaaaggccttgaatgccaggcggagggttagaattgattctgggggtgtgtgagcaggaaaggtcatgagccagggagaggccaggacagagttggttgggggcagaaaggaggctgatgcttgagaccctctggctggggcaactggctggtggtgaggccattgctgaaaggcgaactgggggaaggcacaggtttgggataggaagagatgctgaggtcagcttgggtcgggctggtgaaggagggatgttccaggctgagcctggcgagggggcaggggccacaatggcctccaaggctcagcatcagagcctttgtgaacaggactgggcaagtcaggagcctgggggctcagggaggaaccctggggatggagaggggaatggggggcaggtccagaaccactacctgacccagcctggccccttcacacccacagggagctggcctaccagatcgcagagcagttccgggtcctggggaagcctctagggctgaaagactgcatcatcgtcggtggcatgggtacgggagctgggaggcgggggaagccccagcatgggaccctagcagctttggaccacctgcccagccctgcctctcatgctctgtcccccagacatggtggcccaggcgctggagctctctcggaaaccacacgtggtcatcgccacgccggggcgcctggcagatcacctgcgcagctccaacacttttagtataaagaagatccgcttcctggtgagttcgccccgcccctgcagacctcaggagctgggctcggagcctccaggcccaatgtcagagcctggggcaccatctcatccatttaggaaacgtatgtccgttagactgtccagtaaaacgctaggaacagtgacaaggaccgttcaaggaccaacaagagggggcccagtcctagcaatgttattcgggggtagggccttgctgagacttgggtgaggggcaggcctcccttggaaggagggtactccagggcctagggtccatgtccatgcctctcaaagaggcctgcttcaggggtggccaagacccggggccatggacggcaccctcacccctgcccccattggcacggcaggtgatggatgaggcagaccggctgctggaacagggctgcactgacttcaccgtggacctggaggccatcctggcggctgtgccggcccgcaggcagacactgctgttcagcgccacgctgaccgacacactccgggagctgcagggtctggccaccaaccagcccttcttctgggaagcacaggccccgtgagtccacagcccagacagcgtggggagggcagccccatcctacagacagggacactgaggcgtggcggtctatctgtccatccccagggtgagcaccgtggagcagctggaccagcgctacctgctggtgcctgagaaggtcaaggacgcctacctggtccacctgatccagcgcttccaggatgagcacgaggactggtccattatcatcttcaccaacacgtgcaagtgagcggggcccgcctctcccctcccaccgcccttcaaaggaggaggtggcccgacgtctttggtctgggacacacagccagtctcagcactccccagcctctgctcagcctggaggtcatgggggcttccctcaaggagccaaggtccctcaatctgaaggtgcagccggcctttggggttcctcagcccagccgttgatggaagggccaggaaacccctgcaagcagctgtttgagcagcccatttgctgtgttctgggggtgtcactgagctttcctgggcctttagtcccatctcagaggaagttgtgacaactaacaggcctggtgtgcgtctgcacagacagagacccctggggagggcagttcatatcttcattgaattgtttgggaaggtcattgagaagctggaggctcttccagcatgagccaggatagaagggcagaaatcaaggcgctttaaatgcgttacctcccagaagagaaaagttgggactgggtgcagtgactcacacctgtaatcccagcactttgggaggccgaggtaggcggatcacctgaggtcaggagttcgagaccagcctgcccaacgtggtgaaacttcatctcgactaaaaatacaaaaattagccaggcatggtggcgagcacctgtagtcccagctactggggaaggtgaggcgggagaatcacttgaacccggtaggtggaggttacagtgagccgagatcacgccactgcactccatcctgggggacaaagtgagactgtctcagggaaaaagagagaaaagtttggctgcagggtggctgtcaggcgtggcaggatccagcagcttatgtgatggtccccatcctttctccctgtgcccctctttctcctctgttttcctctgctggctccttcttggccttcttggtaacagtgaccacccctagcaagtcagtttccagccttccagccctgcagtcccagggccaactcttgtcagttccagctccagggagggatcagcagagaggacatcaggcaggcaagccgtctgtcaaccctcatcctgcctcttttttttttttttttttttgagagtctcacgctgtcccccaggctggagtgcaatggcgcaatctcggctcactgcaacctctgtctcctgggttcaaacaattctcctgcctcagcctcctgagtagctgaggctacagtcatacaccatcatgcccggctaatttttgtgtttttagtacagatggggttttgccatgttgggcaggctggtcttgaactcctggcctcaagtgatccacccgcctcagtctcccaaagtgctgggattacaggcatgagccaccgtgcctggcctgctgcctctcctttctaagctgcatgaggccactgtgctaggtgtctcaggggcgggtgggggcaggaacaccttcccagaacctgagagctggaggggttgacaggcacatccttcccgccaggacctgccagattctgtgcatgatgctgcgcaaattcagcttccccaccgtggctctgcactccatgatgaagcaggtgaggccaccctggggcccgccagcctcaccctgggatacctccccgcctcagacattggccccgatccttccttctgccgggcgccttcttcctgccacctggtctcttctggtcccagaatatcgcagctcaagaggccctccctgaccgcatctcttttagccgtcattcatttgtcccggtctgacttctcatggccaccttcctcaatggacggctggggactgtcccggcctccaccctgtcccgaggcctcacacagaaaaccctgccttcatgcattcccaattttcttcccaaccctgtgcagaaagaacgctttgccgccctagccaagttcaagtccagcatctaccggatcctgatcgcaacagacgtggcctcccggtgagcagcccccagtctcctgccaagggcactccctcttttactacaaggccccacagatgagaaggctggcctcaggcatgtcaggcagccctagcatccctgctgagtgaccctgggtgagtccttgcctcggtttccccacatggacagtggagctgaccagccacctctgcctccaggggcctggacatccctacggtacaggtggtcatcaaccacaacacccccgggctccccaagatctacatccaccgagtcggccggacggcccgtgcaggtgagcagtggagggggaggccgagccttgggcctctgtccctccagcctgcccagcaaattcaggtggtaggacgtgggtagggtgcagcccacagatgagagctactcagggccatgtttgcaagttggggagttgtcctttctaaagcaaaggtgaatcccagctactcgggaggctgaggcaagaagatcacttgaacccgggaggttgcggcaagctgagaatgcaccattgcaccccagcctgggcaaaaagagcaaaactctgtctccaaaaaaataaaataaaataggccaggtgcggtggctcacgcctgtaatcttagcactttgggaggccgaggtgggtggatcacgaggtcaggagttcgagaccagcctggccaacatagtgaaacactgtcttactaaaaatacaaaaaaattagccaggcgtggtggagggtgcctgtaatcccagctactcgggaggct

SEQ ID NO: 97059 - DNA, 17186 bp, Homo sapiens
agtctccaagcctggcccagcctcctcagtccactggggaatccccaagcttgacctggccatctcaggccactggggtgtccccaagtgtagcccaccaatctgtggccagtagggtttcctcaagcctagcccagccatctcaagccagtgggatgtcccctagacaagattacccaccagtggcctccagggtgtccccaaaccaagctcacgcatctataaccagcaggatgtcccctagcagagctcatgcatctatgacctgtatggtgtccccaagccaggttcatcgatctatgcccagtgaggtgtccccaagccttgcccagctatctcaggccaccactgcagtgcccttaagaccagctcatcaacctatggcctgtggtgtatccccaagcctagcccagccgtctcaagccacagggatgtcttcaaggctagcccaccaacctatgacctgtgtggtgtccttaagcccagcccagccatctcaagccattggtgtgtccccaagcctagcccacccatcaggaccccatgggttgtctccaagtctagctcacccatatgtggccagtggggcgggctccagcctagcccacccatctcagaccactgcagtatccccaaggcaagcccaaccatctgtggcctccagtccaggcaagacaaattcatcctgtaccctagcctccagcctagccgagccagctataacccccagcctattcccaccatctgtggcccacacggaagccctaagcctggctcagtcacccccggacactaggttggccccaagccgatcccagccatctgtggtcagtggtacatgtcatggcctcaatgagccatgctggggctctaggctggattcaaatctgcagtgttcaagggtggactcagtagccccgtgtctgtgtcacccatcagcgtttgtttcagttagcctgggtggaccatatccctctgtggctggaaatatggaccagggtctgaaccagccatccctgggtactggggtgaacctatgtgaagaacctctgatggttagtgagatggtatccagccccccggacttcaagttcaacgacgtgtcccttgggttccatcatccacccagggttggtgggaggcatgtgtgtccaccctctgtggttagtgtttcaacaccaaatctctctcatgctgatgaggaggcctgttgtgtaggccagtgaatcacgcctctgttcaggggtgtggctgtaagccatccccaggagcctttggctgatgctatgttccccagtgggtctcaggggaccacatctcctggcctagctgggaatctcccctggagaaccatagcaactggcatgggccaaagtcaatgtcaggtggccaatggcatggcttcccttgcatcccaggtcttagaggcaggtggccctttgacacatccctctggaaccacagggatggcccccagcccctctctggcttcagtgcccaacagactggccgtgactcagtctaatctttccctgaacagcatggaccccagcagctcccagatcagtgtggttattccaaaaaacatagactgctggcacccttctgaggcatccatggtcccacccagttaccagcagagagatgtgattccgcaggactctctgaagagcagggctggtcgtggtgcggcaggaggttttgtagccagtagaatgagcacgggcgcagtcccaggcactctgcctggtggcataacctccagccttcccccgggctccaccatccgaggcatgggtcacagccttcccgcaggctctgtgtccagttgggtggctcccagtctgatggcagacagaaagaagccaagtctatctgtaagaccctccgctagcttagctgctccaaacttgctcccaggttcagtagtgagtcgggtgagcccagttgtcccccctggttctgtgccaatgatgggggcctctagtgtggctcagagctgctccaaggggcccatggtgattgacatcactgcccctccttacctcaaagccctggctggggagaggtctttagcccccttgcagatgccccacaccaccagtctggctccaggtcactcctcagccccggcagctagtggcacagtgaggagtctacaccgagtgcccacggttctatcaagagccttacaattgagccaagatgctaggataatgccatctggggtcacaggggaccaagccaagctaggagaattggatgaggctgtgttccaagtgtcaggatcaagtggatccaatgacctattcagcaaagccagggtcactggtgcaacccagtggatgtactccagtcctctgggagctgatgggggccatgatcataggtccctgtctgagaaagggtctcttccccaagggaggtggctcccagccatgctagtggcatggtccctgtccctttccaggccccgggtttagccactaagtccccctcagtttatcaacaggggtctgtcactcacgtcatacccccaaatcactctcagggtacagtggcttctaatgtagtctcaggatcaccccagctggcccgtggcagtactgaggctttcagattgctttcagtgtctgtgggcaggatggggaatcctagtcttcttcagaggtcagggaccaccagcatggtctcacatgtgccactatatccgtcctcggctagaagggcattgtccagtcccttccagacagaagctgtccccaatccactccagaaaacagtgtctggaaacatggctccgagcagccgctgggacgccatgggccctaaaaattcctacagatccgtgcatggtaggattgttccagaactgctagaaagttctgtggccagggttaggcccttacagtatgtgcaaagacaaccatcccaggcctcagcccgaagtggtgcaaaccccacccacaggccctctgcagaggtaaggcccgtcatccgcactggggagatgacacactcctcggtcattcctccgctggccccgggagttcggagggtgtctctaggctatgagtcttccccaagtggttccctgccacccctttttaaccaggagtcaccgtggagacggcaggactcctatagcccccagaatcctgccgttagtcacaaggcatccctgaactccactatactccagggccccgcggacgctggtgtggttggtggccaatcgtggaaccgcgcatgggagccagccaggggtgctgcgtcctgggacacctggcgcaacaaggcggtggtgcctcccaggcggtccggggagccaatggtgtccatgcaggctgcagaggagatccgcatcctcgcagtgatcactatccaggcgggcgtccgtggctacctggcgcgtcgcaggatccggctgtggcaccggggggccatggtcatccaagctacttggcgcggctaccgtgtgcggcggaacctggcacacctctgcagagccaccacgaccatccagtctgcctggcgcggctacagcacccgccgggaccaagcccggcactggcagatgctccaccccgtcacgtgggtggagctgggcagccgggccggggtcatgtctgaccgaagctggttccaggatggcagagccaggacagtatctgaccatcgctgcttccagtcctgccaggcacacgcttgcagcgtctgccactccctgagctccaggatcgggagcccgcccagcgtggtgatgctagtgggctccagccctcgcacctgtcatacctgtggacgcacacagcccacccgtgtggtgcagggcatgggccagggcactgagggccccggggcagtgtcttgggcctccgcctaccagctggctgccctgagtcccaggcagccgcatcgccaggacaaagcggccacagccatccagtccgcctggaggggctttaagatccgccagcagatgaggcagcagcaaatggcagcgaagatagttcaagccacctggcgaggccaccatacccggagctgtctgaagaacacagaggcgctcttgggaccagcagacccctcggccagctcacggcacatgcattggcctggcatctaggaccctggctccctgcagtggggacttcgtgggaggcactcatggctctctgggtctaatgaataaagtcctccacagcctagatcttgggtgatgtgttctgggttaatggaagtggcttgggtatagtgggggaatctggaacatcccagagggaagagaactctgaagttaccaaccatgcagtatgcatctggggtctgtggccagcatggggacctcaaatctttcctggaggtcaggcactgccaatgtggtctcagctgtgcctctgccatatccacgtacaggtagtggggtggtgtccagcccgtcccagatggaaactgtccccagtgcactctagaaatgtgcctgggacctggcccagagcactcacctcaagtccctcacccctaaaaaatcctacaggatggctgggtgtggtggctcatgcctgtaatcccagcactttgggaaaccaagacgagtgggtcacctgaggtcaggagttagagctatcagcctggccaacatggtaaaaccccatctatactaaaaaaaaatacaacaacaaaaaaaggccaggcacggtggctcacgcctgtaatcccagcactttgggaggccgaggtgggcagatcacctgaggtcagaagttcgagatcagcctgaccaacatggagaaaccccgtctctactaaaaatacaaaattagccggccatggtggcacatgcctgtaatcccagctactcaggaagctgaggcaggagaatcgcttggacccgggaggcggaggttgtggtgagccaagattgtgccattgcattccagcctgggcaacaagagctaaactcagtctcaaaaaaaaaaaaaaaaaattagccgggcatggtggtacacgcctgtaatcgcagctacttgggaggctgaggcgggaggttgcttgaatcccagagtttgagaatgcagtgagctgtgattgtgccactgtgcttcagcctgggcgacagagtgagaccccgtctcttaaaaaaaaaaaaaaaaagggctgggcacggtggctcatgcctgtaatcctagcagtttgggaggccgaggcgggtggatcacttgaggtcaggagttcgagaccagcctggccaacatggtgaaaccctgtctctgctaaaaaatacaaaaattagccaggcctggtagcgggcgccagctactcgggaggctgaggcaggagaattacttgaacccgggaggcagaggttgcagtgagccaagattgcatcactgcgctccagtctgggtgacagagcaagactccgtctcaaaaaaaaaaaagaataaaagaaagaaaaagaaatccataatagaaatgctagaaggttagaaggtttcagtcatgtccccaaaaggccccagtctgggtgagacagaggacagaggaggacgaggacagagaacaaggacatccccagccctgtgggttcagggatcggagggaggtgggagaaattggtgctcccagaggggacaacctggctggacgaggggcagagggagtgacagcaggggtttgggcagctgtggaaccaggagcagggggaaagaggacggcaggggcagggtgtctttagtggatgactggctttgagagcttctgggtcgtcgtgtttagaaggggtggagtccaggtgaagagggcgagaaccgcacccgggggaacaggagcgccccagggaggtcccacaccctgcagccccacctgcgccttgcccctgcacagccccgcgctccgccagcagggagcgcacacgcaggtgcaaggagctggcacctgggcacacacctggccacacacctgtgcagagccggtggcaggccctcccggcgcaggaatggcgtgcccccagctgccgccacttctgcttttggtgctggtggtgctgctgaaagctggtgtgaattacaatactccctttacaggtaagagctggtaaagaggctcagcttccagaaagcggaagggtgggggtgggggacgcacagcccagtcacacacctggcttctggacccctccctcaggccacgctggtccgccaaccctccgaggaaggctggcttttcccccagaaacaaacggagcagctgtgaggacagatgaggcaccgctgctcccaagccctggggctgtgggtcctgcaactccagtgagccctgaacctgctggaggccacagatggcctcacacctacttttgggctccttttcaaatctgttgcttttagccaatccccaaagggagaatggtgaagacctcagggccatgggggttccagggaacagggactcacttcctggtcatcaaacatctgtggttcccatgagaagttcttctgggtgtctgacttaattccctcttgctctcctataagacagtgcctagggtggaggggaggagccttgagcttctcgcattccctttttctgccctttacctgccactatgttgtcactctctctgaccggtgtcctaccccacagacctgtaatagcagagcagaggccaccatggctgctgaaatgctcattgcagggaagggtttcattcagaaggcaccacttttatccccatttcatagctcaggaaactgaggctcagtccagcttgtcccagacccagattagaactggttgacttggctcatgtgagcctcccagtctaggagtctctggggagagcaaacacccagcacagtgcctagaaacatctttatttttaccttctggtcaacccttcagcagctcaccagtgcctactcagtgccaggcactcaacagggcttgtgtcctccaactcttcctttttcaagtccacagcttttcctcagttcactaagcactcagctccccagaattctgacttggcttggggtccactctggcctctgaatcatcttcatttcagcagaaacagaggacaagggtccttgaggggcgttcttcccagctccccagtcacctcaggccagaccctctgctactctgagcctcagtttctcatctgtcaaatggggatgaagcccagcctgagttccatgcctcttctagactcagccgtcatccccacagggcctggggggctacatagagatctggggagggtggcatgtggacccagccccctctcagggccagtgttgtgtgttatttcsgcatttctgctgcctagggtgagtcaaggaggaagcacaaagtttggcccagagcagagtgcatgggtggagcagagagttgatgaatgaacttgtaagtgcctaagaggcccagtcacctggaactgggtgggaagtcgttgtgggaggtggctcatgaactgcttacctgccctcagcctggtccctggactccatgcctgggatgggatgtgagccaggaagtagctggaccaacacgtagaagggtgggttccggagacatgttcccagcgcctgtgtctttgtgtcttccattaaagttgaggttagcctagggctacctggagaaaattagggctgatcctctctgagctcataggtggatctttatagttgagtgtcactgtgcacccactgtgtttctattctattgtgtgtgtgtgtgtttttttttttttgagacggagtctcactctgttgcctaggctggagttcagtggcatgatcatggcttactgcagccttgaactcctggactcaagcgatcctcccacctcagcctcctgagtagctgggactaggcatgcaccaccatgcctggctaatttttgttttatttttttgtagagacaaggtctcattatgtctcccaggcaggagtgcagtggcgcaatcatggcgcactacagccttgaattcctggggtcaggcaatcctcccgcctcagcctccccagtagctgggagcacccagcttgtgtacacccactatgaacctgactgatgaactgtcagaggcaccaactccacatgaactccattttacagaaaagaaaactgagtcccagaaaatttaaaggagctgcccagcactgcctgggatgcagtcacttcccatatccaaagggcttctagagctctcagccaagaggactgggaacgctgatctgcacttgaacccaggctgtgggacytcagaccaggagcatgaatttgagtgggagcttcagtttcccactgagagctcacatggtgtcctaaatctttcaggtctccctatgacctggacaaaaaaataaattaattaaaaataaaaatgaaaaggctgggcatgatggcttatgcctgtaatcccagcactttgggaggccaaggcaggtggatcatctgaggtcagaagttcgagacaaatctggccagcacagtgaaactaaaaatgcaaaaattagccaggcgtggtaatgcacgcctgtaatcccagctacttgggaggctgaggcaggagaattgcttgtacccaggaggtggaggttgcagtgagctgagatggcaccactgctctccagcctgggtgacagagcgagacgccatctcaaaaaaagaaaaaaaaaaagagagagagaaagagagagagagagggtctcgctatgttgcccaggctggtctctaattcctgggttcaagtgatgctctcaccttgacctctcaaagtgctggaattacaggcgtgagccaccgcgcccagtttttctttccagatattgtgacctcagagaacagtatggagacatcacctgtcagctctctgatttcttctcccttcgcccacagcacccacagttcaggggaaccccccaaatcctactccagcaccatgagtttggagacagactccataacccacctcagcccctcaagttcaggggcaacccctaccatccagccgagccccagctccacagattcaaggatgataccctcctccccacaaccagagacaatcacgcaccctagttctggctcccccagtgcagagctcaccccctcttcccattccaccctccccagttccgaatccctgaccccgcactggagccccmcttcccacagccccggaacggagcccttgacctccactgaccagaccttggagccccctggcccaggtgagtattaagagatttgggtgtttgtagggaggtggcgggtgtaacaggctgcagttttggaactgaccaccagggggaggtacagccccgagaatgctctaggaagggcttcttgtctctgctccattgtctaaagctcttcatgctatgcgcatttattaagtgcctagtgtatgtcacggctgggcacgcagcgatgggcaaagagagaaactaatacttgctgtggtggggagacaggttatacattatgtatttgggcctgggcaaaatagcaggactttgtctctacaaaaaaatctaaaaatggcggggcgcggtggctcaagcctgtaatcccagcactttgggaggccgagggcgggggcgggggcgggggcgggggcggggggggcgtgtatcacgaggtcaagagttcaagaccagcctggccaaaatggtgaaaccccgtctctattaaaactacaaaaattagccaggcgtggtggcagacgcctgtaatctcagcaactcgggaggctgaggcaggagaatcgcttgaacccaggcggcagaggttgcagtgagctgagatcgtgccactgcactccagcctgggtggcagagtaagactctgtctcaaataaataaataaataaaataaaaatggctgggcgtggtggttcacatctgtaatcccagcactttgggaggccaaggtgggaggatcacctgaggtcaggagttcaagaccagcctggccaacatggtgaaaccccgtctctactaaaaatacaaaaaatagccaggcatggtggcgggcgcctgtaatcygggctacttgggaggctgaggcaggaaaataatttgaacccaggaggcggaggttggagtgagcccacattgaaccactgcactccagcctgggagacagagcaagactccatctcgggggggaaaaaaagactctatctcaaaaataaataaagtaattgattaaataaaatttaaaaattaggctgggctcagtggcccacgcctgtaatcccagcactttgggaggccgaggcgggtggatcacctgagccaatgagttcaagaccagcctgggcaacatggtgaaaccccatctctactaaatatgtacacaaattagctgggtgtggtggcacacacttgtagtctcagctactggggaggctgaggtaagaggatcactagatccttggagatggaggtcacagtaagctgagataacgtcactgcactccagcctgtgtgacagagcaagaccctgtctcaaaaaaaaaaaaaaaaaattgtccaggcatggtggtgcatgcctgtaatcctagctacttgggaggctgaggtgggaggatcacttgagcccaggagatagaggctgcagtgagctgtgattgcactactgcactccagcctgggtgacagagtgagaccctgtctctaaaatacatgattaaaaagtggcagcctcaactggagagggaagagaggtcagcttcctgagaacagatttaaaaggctctgggccctggtgggtgtcttaggcttgtggggaataggacccagtgctgactctgagytcctttccccagctccaggtgacactgggccccgtgagttacacaggaacccgagtgtggtggtggtcrtgtgtttgctggtgtctcttttgctcatcgggtctgtggtcatggctgtgagattctgtcaccggaatgagtccaagtttgagaacctggacgaggtgtccatggtaaggtagggctgggctgggggctcakccctggggccaaggcatggttggggragctgctatcccaagcagggccaacctgggctgcagagccttttggtgtctgaatgcctccctgtgtgttccttcctcagggatccgtgaatgacagattgtcctttgcccaccacctccaggagtgagccctgaggagccaacagagatgggggcatggatggggctggggttcctggggaggagcagaacctgaggaaataaagcccctaccattcatccaaggcctcgtgtgaaaacacgagttatggactcgtgtgaaaacattaactgagcacctactatgtgctgggctctgtgctggggtcacagtggggaccatgtctttactttcaggggatccacagactcaaggcagggacagataagaatcaggagctcacttggctgggtgcggtggttcacacctgtaatcccagcactttgggaggccaaggcgggcagatctcctgagcttaggagtttgagaccagcctggctaacatggcgaaactctgtctgtactaaaaatacaaaaattagctgagcatggtggcaggtgcctgtaatcccagctactcaggaggctgaggcagagaatcgcttgaaccagggaggcggaggttgcagtgagctgagatcgccccattgtactccagcctgggcaacagagcaagactccatctcaaaaaaaaaaaaaaatagggccaggcgtagtggcttacacctgtaatcccagcactttggaaggcaaaggtgggtggatcatttgaggtcaggagttcaagaccagcctggtcaacatggtgaaaccccatctttactaaaaatacaaaaattagccaggcgtggtggtgtgtgcctgtaatcccagctattagggaggctgaggcaggagaattggttgagcctgggagtcagaggttgcggtaagctgagattgcaccactgcactctagtctgggtgacagagtgagaccctgtctcaaaacaaacaaacaaaactgggggtgccgggcatggtggcttaccactgtaatctcagcactttgagaagctgaggtgggtgaattgcttgagcttggtagtttgagaccaaattgggcaaaatggcaaaaccccatctctctctctttttttcttttttgagacagtctccctctgtcacctaggctggagtgcagtagtgcagtcttggctcactgcagcctctgactcctgggttcaagccattcttttttttttttttttaataagatggagtttcgctcttgttgcccacactggagtgcagtgacacgatctcagctcactgcaacctctgcctcctgggttcaaacgattctcctgcttcagcctcccaagtagctgggattacaggcacctgccaccacactcagctaatttttttgtatttttagtagagatggggcttcaccatgttggccaggatggtctcgatctcctgatctcgtgatccacccgcctccgcctcccaaagtgctgggattacaggcgtgagccaccgcgcccagccaatgaccagagagggtctttgatctacccggggcggcacagcacagcgggcaactttcctggagcccccaagctccttaggccacaccccatgggctctgcttggaagcagatatcctagaccctgagttgataaaatcccccccttcccagagctgctggtcccctaccaccatcttccttcgcgccctctctctcactctatcatatgcaaacacatgaacaattaatcttaacacctctcacccagcctcctcactcctacgcctcccttccctccttcccccctccttcctctgccctccccgcccctccccctccatgcccggccaccctcttggccactctctcgtcccctcaggccctcttggacactctgccctccacccactgggagcctcacccaaggaaagtgtgtggattatgtcctggcctggtgcccagacagttaaggggctccgctgagtgggtgttgagggagccctgggcctccctcttggtcaggtcattttctcctctccttccctcactagccagcaggtcatgggacccaggcaggactccgcagtggtggtaagtgccagacatgcctgggcctcctggagcaagcttattcttgagcttgggggcgtctcaggagaggtgctggggtctcgtaatccccctgaaaccatcagagccactctgggagctgaatgggtctcccatgtgtctggggccaggagaccttgtttcgccagtcctgatgcccccacccaggctgctgaacccggacaggtgtggggaggggctttgggcacctggctgctgtccctggatggggaccgctgcaaggtccgggcgggtgtctcacactggtgcctgtggtgtggtccatgccaccttgatttagttccttggggttcaagggagggtgcagagagtgtgggagtgagcttctgtctagggggtgtcccacagggccgtacctgggctcccagtggtctggaggtctcagaaccatttctgcagggccacagatgccagcagcatgaggcacagcaggacaacactctccttcctgctgagtgaagtgagtagggggtgggggtggcccaggccatggtggggagatcccagagaccctctactgagaaatacccagagctggccaggcgcggtggctcacgcctgcaatcctagcactttgggagggcgaagcaggcggatcacttgaggtcaggagttcaagaccaacctggccaacatggagaaaccccgtctctactagacacacaaaaaacttagctgggcatggtggctcatgcctgtagtccagctacttggaggctgaggcaggagaattgcttgaacctgggaggcggaggttgcagtgagttgagatcacgccactgcactccagcctgggagacagagtgagactctgtccccaccaccaaaaaaaaaagaaacacttagagctgcttggggaccagctcacaggggcccactgaggcccagagaggccaccagggaattggggacctgatccaactgtccagcccagggctgtggccactgcttttgggagcaggagatcccttgtgcctggacacaaggttttgactcacccaagaaaaggggacctggctgcccccgggcctgagcagtgggtcatgaggtcacaacttcagatcacagccagtgcccccattctgggaaactgagccaagaggaaaaccctgcgggggctggattcaaatcccaggcccatcacctgagtggctggtaacctctctaggactcagtggtttctgttgttgttttgttttgttttttagacagggtctcactctgtcgcccaggctggagtgcagtgatgtgatttttgctctctgccatctctgcttcccgggtttaagtgattctcctccctcagcttcccgagcagctggagttacaggcacaagccttgacgcccggctgatttttgtatttttagtagagacgggtttctccatgttggccaggctggtcttgaacccctgatcttaagtgacccgcctgcctcagcctcccaaagtgctgggattacaggcatgaaccaccatacctggccagaactcagcgtttttgtgtgttaaaaaactgggctaacattgtgtggaatgagggtgctcagggtgagcctcgggtctcctagggcaggcgtagctgcatatgccttaatgtttatttatccacactccagccatctgcaggaagaggaaaggaaaagggtagtctgggcgcggtggctcacgcctgtaatctcagcgctttgggaggccgaggcaggtggatcgcttgagccgaggagttcaagaccatcctgggtaacacagtaagaccctatctctattaaaaaaaaaaaaatagccagtcatggtggtgtacgcctgtagtcccagctacttgggaggctaaggtaggaggactgcttgagcacgggaggtcgaggctgcagtgaaccgtgatcatgccactgcactccaggctgggtgacagagcgagactccatctcaaaaaaaaaaaaaaaaaaattagcctggcgtggtggcgggcacctgtaatcccagctacttgggaggctgaggcaggaggatcgcttgaacccggaaggcaggggttgcagtgagccaagatcacaccactgcactgcactccagcctggatgacagagtaagactctgtctcaaaaaaaaaaaaaaaaaattagctgggcatggtggcaggtgcctgtaatcccacctactcgggaggctgaggcagtagaatcgtttgaacctgggaggtgaagtttgtagtgagctgagattgcgccactgcactccagcctggacaacagagcgagactccgtctcaaaaaataatgataataataaataaataaaggaccttctgatgacctctcccacactcagctcacagcatcagtcatttcacctgcacatgggcacccgctgtgtgccaagccacatgctgagtgtgtaggacacagaactgcagtgacaggccccaaaatgacagggctcatgagacagatgttaaggcaagaaaaaagagaaaatgtgggggtgggtgagtgctcatgagactgctcgagctgggcaggagggccttctccgggaagttgacattttagctgaagtatggatggaaacaagcagctggccattttaacagctgggggaagggtgttcccggcagatggcacagcacatgcaaaggccccgaggcaggtttaaggaacagcaaagaggccaggcacggtggctcacacatgtaatcccagcactttgggaggctgaggcaggtggatcacctgaggacaggagtttgagaccagcctcgccaacctggagaaaccctgtctctactaaaaatacaaaaaataagctgggtgttgtgacaggcacctgtaatcctagctacctgggaggctgaggcaggagaattgcttgaacccaggaggtggaggttgcagtgagctgagattgtgccactgcaatccagcctgggcaacagagtgcaactctgtctcaaacaaacaaacaaacaaacaaaaaaccaacaacaggctaggcacagtggctcatgcttgtaatcccagcactttgggaggccacaactggcggatcatgaggtcaagagatcgagaccatcctggccaacatggtgaaaccctgtctctactacaaatacaaaaaattagcagtgcatggtggcacgcgcctgcagtcccagctactcggcatgctgaggcaggaagatcacctgaacctgggaggcagaggttgcagtgagacaatattgtgccactgcacttcagcctgggtgaaggagtgagactccatctcaacagaaaataaaaaaagaaagaaagaaaaagaaaaaaaaaaagctggtcactgtggctcatgcctgtaatcctagcagtgtgggaggccaaggcaggtggatcacctgaggttgtgagtttgagaccagcctgatcgacatggagaaaccccgtctctactaacaatacaaaattacctgggtgtggtggtgcatgactgtaatcccagctactcgggaggctgaggcagaaggatcgcttgaacccaggaggcggaggttgcggtgagccaagatcgcgtcattgcactccagcctgggtgacaagagggaaggccctgtctcaaaaaacaaaccaaaacaaacaacaacaacaacaacaacaaaacccaacaacaacaaaagggagctctcagctaggtgtggtcgcggtcgcctgtaatctcagaactttgggaggctgaggtgggaggattgctttatcccagggggccgaggctgcagtgagctgtgactgcgccactgcactccagcctgggtgacagagtgagacgtcgtctcaaaaaaaaaaacaaaacaaaacaaaaaggggaggtagctcagggtctcctacgaaggccttccccacccaggagcctcccatcaggccctccatccccatcccagcttcttaatgaagagggcaattaatcaggagtagcagggccaggtgcagcagttcatgcctgtaatcctagcactttaggccgag

SEQ ID NO: 97060 - DNA, 37064 bp, Homo sapiens
tgggggtcaggaagaaccagaaagggggaatggaggacgtgggataagaaagggactccagggggagggcaaaaatgttcatgacagaaggactcgggtgggtgtgtgtttgcacacatgtgtacaccaggggtgtttcaaggaacataagcaggcctaccttttggtgtcaacggtggtaacattgaaggtgactcccttgagccacagtaccatgaacagtctctgggagaatgggcagttcccaatcttggccccatcactgccagcctgaaaagtaaccccaacccaaggttatgcctgatgcaccccacccatccctaggccagtccctgcattcccactcccagaccagctgttttctgcctagtcatgacacatacactgtcccctcactatgggctctttgcccttgggcctgggtcaaacctaaggcagatcaatgggaaactgttttgcaaaggcaggcttctggttccccagacactgaggacaggtgggaggtaggtagagggaggaggtcctggagaacttgggaggatctgaatcctagagagggaagggtgtggaacttcagtgaggccagagttgtaggctagaagcctggatttctgggttcctgaagggagtagagtctgaagacaggagaggtgggtggggtttgggagccagagttttggttctctacacctccaatccaaggtgtctttgggtggggagtctagtcaaggggccctgggcctcgcgctagagatgtggagggccctacagagaggggctgccctctaattagcaagtggtgacctcattggcccaagggacacctccccctaagctgagggtgattcatctctctgtctccggcttccttcctgtcaaggatgtgggggaagggacagtgaggatgaggcctgggcagctaaggctacccctaacctgctgccagggtctcccagcacaagtcctctgactgcaataaccatcctctcacaggacacagggccggaatctctgcggcacagcctcacccacgagtaaaaatagccccggaggcgaatgtgagagtgaggtggggaccacacctaagggggcggacccaagcaggctccgacttccctgggcccagggagagggaatggctgcccgagaaacccaagcagaagggagagggagacacaggcagagacacacaaagatgagagaaacaaaaggggggaaggggaaagaaaggcggcaggaaagtggagagtggggagacgtgcgtgccaacggagagacacaaacggagcggggagaagaggacactgttaaggaagggagggaggggcacagccaggaggtcccaagactgggaaatgaatgcagcagcggtagggaggggagcggccgctgcaatcagaggggggctgggtgacaccgagaagcctgctgcctgcagttttgctacccaaatgccataggaccatctctccttacccacacccgcagagagaggagagagttggggcaagtcttctacttctccaacccccaaatcccaaaatgccctaaccgagctcttctcctccgtctgatctctctcccacccatccttgtggtagctacgttaaactcacgtcttcttgccacctccccttctgtccctttccccagtcctggggatattcaatgccacccgatcacctctccagctctgcttttcaaactccgatcccagtctcctgttttgttccgcccctccaaagcttcccaatttacttgctctcactctcaggcctccctcaacacaccgtcttccctgaagcgtctccatccacacacacacacacacacacacacacacacacacacacacacctctcctactgcactactcaccctcagatcttgtagggacacatgtcctaactgaggttcccctctgtcccttctaaaccctgctgggcccccactgtcccttcaccagctcgccctctaaccccaccccagtctcacttttgggaattctcctttttctccacttcccttcctttagtctgctagaaacttgcacttttacaaacttttcagggttgatcctagaattctcattacttgctaacaagttaatgtcttcccctctcaaaaccacccctcaaccaaagagtgcacgtgggattgggggtgggagtcaaggagggaagggattggggagttaaggctggaccgggggaaaggtgagagttggcttccaggaatttgggtggctgaggagagaagtgttcttaccttcacgaacaattcgacctgcggttgttcttcagccatggttgcgtcggggaccaggaagtggccgtccctgggggaactgggaggggctgggaccggggaaggcgggtctcacactcagggactctctcccctagacccagggctgtcccttcagcacaacacaagctcaatcagacctacttgcacccaaactaggcctccccaccagcccaacgcaccccacacccagctcctccagctcggtcctctcccgggctggatcagagagccgctgactcaccgaccggccccgccctgaacctggggaggggactggaggggggcgggactcgacgatgtagggagtgagtccggaaggggaatcctcggatctcccacaggatggggatgggggtgttaaggaggagtcctgaaaacctccttgtttctccgacctctcctgaacacaggactcttttctgcctcagtttccctgcttcattaatctgagtacaacccgactgaccctcatataaaaaacttgacactaacagcttgggcacacccgtgaagattcagggatggggacttcaaatggaaaggtggtcgtttaatcattctgcatttcttccagactccaatccaaattctgggttgctgggactgtggtctgagagaagaactcggaagtggaaggctgggactgcagataggaaccgttagccatgcagcctgggattagggaaggggtgacgccagcactccctgagctgcccagactggtgtctcagtaggtcctgtgccccccgcagtctactgtctccgggcccagctcagcactaggacttgcagtccttgtggcctacacttgggattgggcataggaaatagagttaggggccgggtgaggtggctcacgcctgtaatcccaacactttaggaggccaaggggggtggatcacctgaggtcagggagtcaagaccagactggccaacatggtgaaaccctgtctctactaaaaatacaaaaatttgccaggcggggtggtgggcacctgtaatcccagctacttgggaggctgaggcaggagaatcaattgaacccgggaggtgaaggttgcagtgagctgagatggtgccattgcactccagcctgggcaataagagcgaaactccatctcaaaaaaaaaaaaaaaaagaagaagaagaaaagaaaaagaaagtagagttagggatgggaagggagatgacgaagtcttttgcgaaggaaacataaagccgaggcaaggggctttgttgcagggaggggtctgttcctgtagcttggtcagctttgtgcttccacttatgtttcctattggggccccttcctgtgccctttgtcctcgtctcactgacaggttgccttggagatggggcagaggggtgggattatcatggcccgatcctgaagtatgtgtatagggggtggggtaggggtgttgttagctggtcctgtcatggggataaagaaagatcagacagaatagtgggagtagagtccttggggacacctaaataaataagcagggaggacataggaggagcagctctctctccagtaaccttgatttctattaaacctttatgacctgctgaaaaaataaacccagaattccagcctccatatcctgaatttctctcctgtccaaccatcccttctctatcctcctcatcaccctctgtccaacaaaagacctacagttccagaaaaccatggtggagtgcaagaacacagaactaaaacagagcttgaaacttaaagaaagggagagacttgggggaggagtggggtggagtgacgtgatgtgctgctggaaaccagcagttggtggtttcctcttgtgcttcctcttctgtgggttttctcctgcttgtgggagggcctttttctctcctcccgacagaaaggctatctttggtgttcgttcccttgaactgtaacatcctgtaagggtatgattccatgcctctgtgtgggtgtgaattccctcatggtgaccctcaaaatctgcacacaggaccccttcccattgaggggaggggatcaaaacaactctacttctcagggtcctctcctgttccaactggtctgtgtccaagagaagccttaggtaaatggggccagcttgaagatcaaacaggtttggcagcctctcccggcctctcttttctctcctacagctttatagctacagctgccttgatatcaatattgactttggctggctggcatgactacccacagggtatcgtgccttaatttaccaggtgacaggcaacgctgccctctcctggaaccatccagcagagccagggctgtacccccaaatcctgcaacagaggtttccctccatctcacctccctgtccctgcatttctcctatctcagtagctcctctttccctctctgggcttctctttccactccctccccttcctgggcttggtaaactagtccctaatctcttcacaccccagattggaaggtgggtccctccctgacactccccagagctgtcaccaacctcctccaagtttctatagctccattgctcaacagatttgccaggggtaaccattaacccagcccttaactctgttcccccacctttcttgctggaggggattttccaattactggttagcacagctaggtcatctcacccccaccatctttcctaacttcttgggttggggggctggggaggaatctccccatctcagggtactaggaacaaagctggggaggatggtgcatttaaagggattatatatatatatatatatattttttttctttctccctcataaccccacccccgcaacacacacacacacacacacacacacacacacacacacacacacagacgcacaaataagctttatggagcagtgacttcattatgttcaccgctttgagtccaacccctggcccaaaataggcactaaatagttgccgaatgcatgaatgatagatacctctctgtcttcaggggtgtgtagaagtgcgaaggggtatgggcatgtcccagtaggggtgtgagtgttctgatcagaactacttctctctgccagaatttgatgtaattcgaatgcttccacctctgcttgaagggtttaaataataaattaggccctgtcgtgccattatgggggtggtcataccctgtacccaggaaacaggcacggtagggctgagacagaagtcctgcttgtttccgcttatttatttgaaacaccgctcatttaggtcttactttgtttgccaggcactgttctaagctctgtataaatattaactcagagggtacaaatattaacttaagagttgttgcaggaaaaaaaataagcgcctctggctctttaagtttggcctccccctcaaaacccccgcaacggtcccaaaccccttccagggactgggactacggaccctggtccgaccttctcgcgggcttcccactgcgccaatcaaatcccagaaacagtgagtgctagaggcccggctgctaagcaacggcagagggcgggaagtttgaacgttctggacccgccccgaaggcaaataggccaatcagcgtccagactcttcagctacggcagtccgcttctcctcctcgccctgtcggatctctaggctggatccgggcctctccaatcaacagcggctaggagggcggggcgcgtgcgcgcgcacctcgctcacgcgccggcgcgctccttttgcaggctcgtggcggtcggtcagcggggcgttctcccacctgtagcgactcaggttactgaaaaggcgggaaaacgctgcgatggcggcagctgggggaggaggaagataagcgcgtgaggctggggtcctggcgcgtggttggcagaggcagagacataagacgtgcacgactcgccccacagggccctcagaccccttccttccaaagggtaacctccgcgtgacaggaatgagggtggggcgcgtggagtttcccacaatctgtactttagttaaatacccgagaattcacctcctgtgtccacagctctccacgcccctcagccctgccccgcagccctgtagcagaagtacttagygctttgcattctgcgcgccaccctaccccggcctcctctgtgaatcgttgcttccgaaccgccctcactttttgcatccgcagagcctccaagctcatggcctccttaggagcgaacccaaggaggacaccgcagggaccgagacctggggcggcctcctccggyttccccagcccggccycagtgccgggccccagggaggccgaggaggaggaagtcgaggaggaggaggagctggccgaggtctctgaggggagtagaaacttgaatggagagttgatgggaagttagaataaaagagggttgggagccgggcgcggtggctcacacctgtaatcttagcactttgggagactgaggcgggcggatcacctgagctcaggagttggagaccagcctgggcaacatggcgaaaccccgtctctactaaaaatataaaaattagccgagcgtggtggcacgtgcctgttatcccagctactgggaaggctgaggcaggagaatcactgtaactcgggaggcggaggttgcaatgagctgagattgctccactgcacttcagcctgggcgacagagcaagactccgtctcaaagaaagaaagaaaaaaaaaacagggttgggaagagctgggcaagtctcttacctcctgagtggctgtttcacattcactaaatgggggtgatgatgcctatctcagagatttgagaaaatgattaaattatataagacatggtaaaccctacacttatgagtgattctaatagtgatttcctttcttccttgctggacagatccatctgtgtgtgctgtggaattcaggatacttgggcattgcctactatgatactagtgactccactatccacttcatgccagatgccccagaccacgagagcctcaagcttctccagagaggtggggatggaaccatgaattcctctgctctctgggattgcagatgtgttmcacacacacacacacacacacacacacacacacacacacacatattttttttttctagacagagtcttgctctgttacccaggctcaagtgcagtggcgcaatcttggctcactgcagcctccacctcctgggttcaagcaattctcctgactcaacctcccgagtagctgggactacaggcgtgtgccaccacacccagctagttttttgtgtgtgtttttagcacagayggtgtttcaccatgttggccagggtggtctcaaactcctgaccttgtgatccgcccaccttggcctcctaaagtgctgggactacaggtgtgagtcaccacgcccagccatgttttacttacattaactcacctcactgtctagcatattttgtgttgctgtaaggaaatacctgactctgagtaatttgttaaaaaaaaaaaaaagttttatttggcttatggttctggatggttggaaagctcaaaattgggcatcttcactggtgagagcctcagactgcttcaactcatggaagaagggaaggcagggtgtgtagaggtcacatggcagagaagaagcaagggggagggagatgccaggctctttttgacaaccagctctctcaggaactaatagagtgagaacctctcactcatacccaccarcacactccaggaagggcattaatctgttcatgagcgatccactcccatcacccacacacctcctgctaggccctacctcacaacactatcacactggggattaaatttcaacacgatatttggcagggacaaatcacatccaaactatagcactgactcaatatattttacagttgcttcacagaggctccctcttttgtttttatgaattcatttcattatttaacaaatatttgtgaggytgttttttkgtttgtttggttgttcttttttgagacagtgtcttgctccgtcactcaggctggaagtgtagtggtgccatcttggctcactgcaacctccgtctcccggattcaagcaattctcctgcctcagtctcccgagtagctgggattacaagaatctgccatcacgcctggctaatttttatatttttagtagaggcagggtttcaccacgttggctaggcttgtcttgagctcctggcctccagtgatctgcctgccttggcctcccaaagggcagggattataggcatgagccactgtgcctggccacaaatatatatgacgtatttacaatgtttcaggtgcttcagattcagccctgggcaaatcagtcatgtctgttctccaggggtttacagcctagtgacaacatccagaacatcccacttccctctcaccatcccaccactcttaactacttttctaaatctcaacttctacctgtgttcccactgtgcagagcactccctactcctagggaggaaatgtttttgagaaggagaggggtaggaagaggagggctatgggttttctcttagtcaaagacaaagatcctttaactcatttgatctctgttctccttccaagttctggatgagatcaatccccagtctgttgttacgagtgccaaacaggatgagaatatgactcgatttctgggaaagcttggtaaggacttggtaaaggatagagggaaaatggggaaggactaatatatggaatattccagggggctagaattgggtgagagggagtgtcagacagaggtagaaggactgagatgtaaagaatgatagccttttctttcctcccccacagcctcccaggagcacagagagcctaaaagacctgaaatcatatttttgccaagtgtggattttggtatctccttccttttgcttwgcctaactccctgttccggtgtcccattctttcccccaactctaccttcatcatcacagatctcccctctgccttatgtcatcctaaacctttgtgctcctcatgccctatgacctgtccccccaagatctctcctgctccctaccctttaataayctgcagcttattgggaagcctctgcttaagtcatgtctagggatgagggcctcccctgaggagtggtgacactttttggacagggttttattgttggaattctccccattaagttaaagccttttatcaccaaaccaaaaggcactgcctcagtgacccttattatgatccataaggcacttctataactttcctaggtttacaataagaacaggagtgtactatcctaattagatattaaggcattagtgttactagttctattaataccattattttgaccaaaatcctcaattccagacagatgtctactttcctcagccatttatctttctcaggctgtgctttcagacaagtatctttatattatatgtagaataaaaagagaattagactaagagtctgaaaatttggttcttgctctagctttccattaactgcctgtgtgagcttgggcaagtcaaataatctctcttgcttctattgtctcattcttaaamtggggtgaaaaaattgagctacaagaccgttccctttgcttgcctccctcaaataggtctggagataagcaaacaacgcctcctttctggaaactactccttcatcccagacgccatgactgccactgagaaaatcctcttcctctcttccattattccctttgactgcctcctcacagtgagattggtcctgggggataagggctgggaggcggcacaagtgctagggctgaattctgggaggtactggcctagccctggaaaatagtaactttccctggtgctctgcagcccccaggagatttaagatttaccccgattccactgctgatcccctcccaggttcgagcacttggagggctgctgaagttcctgggtcgaagaagaatcggggttgaactggaagactataatgtcagcgtccccatcctgggctttaagaaatttatgttgtaggtgattcmccccaaccccaaccaaagtaatgtgggattgggaggcctgaaaagtaaagtgggggtggggtgtggatgtggctgtgacccagtgggtcaagkgctctaggacacccrggagaatctaagggctaatgagactttgggaagaagactgggacaatattcagagagggggacaaaggaagtggagttgtggaacgaactcagactgcttcctgcttttttgttttctgtcctcaggactcatctggtgaacatagatcaagacacttacaggtaaagaggtggaggcatgctgctgtctctggggagggagaaggattaagtttaatgccccaataatcctaatgaggctctagtttccctaatcctggggctattaagatctctctccttgaaggaaagggaaggggggttttgagggaaagagaggaagaaaagcataaagatactagctttcttttctatagggagaaactgaggcaaagaaaagtaagggacaaaccttacatcaagatatgatctcggctgggcgcggtggctcatgcctgtaatccccgcgctttgggaggccaaggcgggtggatcgcctgaggtcaggagtttgagacctgaccaatatggtaaaaccccgtctctactaaaaatataaaaattagctgggtgtgttgtgcgcctgtaatcccagccactcaggaggctgaggcaggattgcttgaatccaggaggcagaggttgcagtgagctgaaattgcaccactgcactccagcctgggcgacagagcgagactccatctcaaaaaaaaaaaaaaaaaaaaaaagacgtgatctcaggaggatatcccctgtccccattccatttatcagtcctcaattcttattcccttcaaaagtccaagttaccccaaactcctccatttctcctcgacagtgttctacagatttttaagagtgagtctcacccctcagtgtacaaagtggccagtggactgaaggaggggctcagcctctttggtaggtgtgccccatccctcatctcacrttacaaagacctaccagaaaagcaattggctccaaagatgtgtcccagcctcccttcccacttcactcccattgtcagatatctctttcatgccaatccaaatttcttacctatttgtaccccccgccccccaagcttgagcatcttcccatactttgtggctgtacagtgttgttgcatatcagccattactttaccaattctgtgttccttccctgggtttgtatgaatgtttctactagttgggtacctgttagggactttgggagaccttgtgtatagagaagagttttgtaactgcataactgcctatttgatttgtatagagtytttatcagttgtctctggctttagggtatattagggacatctccgcaaatatccatatagtttcatatctcagtaagttgtgtccaggttttttttttttttttttttgagrcagagtctcgctctgtcgcccaggctggagtgcagtggtgcaatatcagctcactgcaagctctgcctcctgggttcacaccattctgctgcctcagcctcctgagtagctaggactacaggtgcccaccacgatgcctggctaatttttgtatttttagtagagaacgggtttcactgtgttagccaggatgatctcgatctcctgacctcgtgatccgtccacctcggcctcccaaagtgctgggattacaggcgtgagccaccgcgcctggccagttgtgtccagttttgtgtgtgtgtgtgtgtgtgtgtgtgtgtgtgtgtgtgtgtgtgacgaagtctcgctcttgtcccccaggctggagtgcaatggtgcgatctcggctcaatgcaacctctgcctcctgggttcaagcgattctcctgcctcagcctcctgagtaactgggattacaggcacctgccaccacgcccagctaatttttgtatttttagtagagacggggtttcaccatgttgcccaggctggtcttgaactcctgacctcaggggatccactcgcctcagcctcccaaggtgctgggattacaggcatgagcgaccgcgcccggccgtccagttttttacatatgtgtgttgggctcttgagttttttgtttstttgtttgttttttagatggaatcttgctgtgtcacccaggctggagtgcagtggtacaatttaggctcactgcaacctccgcctcttgggttcaagtgattcttctgcctcatcctacctcagcctcctgaatagctggaactacaggcctgcaccaccatgcccagctaatttttttgtatttttagtagagatggtgtttcgccatgttgcccaggctggtctcaaactcctgagctcaagtgatcctcctgccttggcctcccaaagtgctgggattataggcatgagccaccctgcccggccagctattgagtttttgtatttttggaggggcgggagggctcttgagttttttgtgttttgtttgtttgtttatttgtttcgttttgttttgagacggagtcttgctctgtcacccaggctggagtgcagtggcgcgatctccgctcactgcaagctctgcctcccgggttcatgccattctgcttcagcctcccgagtagctgggactacaggtgcctgccaccatgcccggctaattttttgtatttttagtagagactgcgtttcaccatgttagccaggatggtctcgatctcctgaccacgtgatccgtctgcctcggcctcccagagtgctgggattacaggcgtgagccaccgtgcctggccagttcttgagttttaactaggtctgctttgtgtatttttctggctaagtgtccctgtgagtgtccatcccttcccccatctccatgtacggtaatcccagctcatatttgtggccaggcaccagctttggctgcctttgtgccctcccaggccagcttcctcaacaaccagcacctctgacctggatgcctcagcttagacacataaacacattccattccctgtccctgccttgtaacaagttcactccctgccttatccctcacaggaatcctcaacagatgccactgtaagtggggagagaagctgctcaggtgagtgggtcccacacatactacacactaatgcatgaattccatatgcacactacatactaaagcctactaatggcagtatacagattctcacatacaccaccccacctagtagtagtaaagcaactgccctttactgagcactggctaactgcatttcatccttataacagctttgtgtagtagctgatatgcatctcattttttgttgtcagcgcaggtacacatatacccattgatgatacacagacttgcacacatacaagcagcaggaaaaaacacaaaatgtaaggccgggcacagtggctcacacctgtaatcccagcactttggggggccaaggtgggtgaatcacttgaggtcaggagtttgagaccagctggccaacatggtaaagccccatctctactaaaatgcaaaaattagccaagcgtgttggtaggtgcctgtaattccagctactcaggagactaaggcaggagaatcgcttgaacccaggaggtggaggttgcagtgagccaagattgtgcactgcacttcagcctgggcaacagagtgagactccgtctcaaaaaaaaaaaaaatgctaatgtaacacatggctatgttagcatggttatctttagttatagaaaacacacttcacatttctgtgatgactctcaaatttgtgtctctagttttgaactccgtatgtgaatgttaattgcatatcaccacctgcagttttcacaggcagctcaaactcagagcatccaaactgatgcccaccagatctgttcctcttcctgcattccctttgctggttaatggcattgctggcagtacaccttctcaagccatgaaccttggattgatgctagaaacaaaaaacctgtcattccaaaacagagatctaagcatgtcactcctttttttttttttttttttttgkgactgagtttcgctcttgttgcccaggctggagtacaatggcacgatctctgctcactgcaacctccacttcccgggttcaagcaattcttctgcctcagcctcccaagtagctgggattacaggcgcccaccaccacacctggctaatttttgtattttcagtagaggcggggtttcaccatgttggtcaggctggtctcgaactcctggtgatccgcccacctcggcctcccaaagtgctgggattacaggcatgagtcactgcgcctggccgtcactccactttttaaatagcctaagtagaaagaaaataacataaaccttaggaggttttcccattaccttcaggattaagattagcatcttaagcagtataatgatgttcagggtccatcacgtttaccccagttttaatttccagactcaccttccaaagccccttctaagtcctttcctactggatctaccttatattctagtcatttagggccacttgccattatggaaacatgtcatgcctgtgtttatgctgctccttctggaaagtcttttttttttttttttgagacggagtctccctctgtcacccaggctggagtgcagtggcgcggtctttgctcactgcaacctccacctcccaggttcaagcaattctcctgcctcagcctccggagtagctgggattacagggacccaccaccatgcctggctaatttttgtatttttagtagagatgggatttcaccatgttggccacgctggtcttgaactgctgacctcgtgatctgcccacctcggcctcccaaagtgctgggattacaggcataagccactgtgcccggcctggaaagtcttttccttgttctgtacctatcaaaatcttacatccaggtcaggcgcggtggctcacgcctgtagtctcagcattttgggaggctgaggtgggtggatgatttgaggtcaggagttcaagaccagcctggccaacttggtgaaacttcacgtctaccgaaaatacaaaaattagcccagcatcatggcgcatgcctctagtaccagctactcaggaggctgaggcaggagaattgcttgaactcgggaggtagaggttgaagtgagcccagattgccccactgcactccagcctgggcaacagagtgagattctgtcttaaaaaaaaaaaaaagtgcatcctcttcaaggtgcaatccaactgttaccctttggcttttacaggtacctgtaaggagttgatgtgcaccttctttgtgctcacatagtgcttgtttatgtttttctagttgcactgtcacatcatgttagaattagcagtcagtgaatctgcttgcctccatagctatgaactctatctagtagctatacctgttacctcagtgtctgacacatggtcttgtacatagtagcactcaatgtgtgaacacaacgcaaatgtaaacgcactggtgacatcatctctaaacagagtggaaacctttgctagcctcaggtgcacaatccttcccctacctcacctcccgctgcaatrtgtrtcttgtaggagttaatttaggataatctctgaggtcatctccaggtaatcagcatctccaggaatcggcagggtaatttaattacccacacattcttcagtgcttcaggtgcagatctttaatctcagccacagatgggagggagagaattctcagtggagaagagagctggatttaaggtcggggaggaatgcgtattccccaaatggaatcagacagggcatgagatcatataacttgaagaatcatcatataatctaatgaactaaggacaggtgacatatttattaatatttctgtatacgaatttattttaatttattaggaaatacctctaaygtacaaaaagatgtaaataataatatagggccagatgtggtggctcacgcctataatcccagcatttgggaggctgaggcaggaggattgcttgaggccaggagttcaagaactaaaagctgtacaggcaccaagaatatgactgaatgtcacagtatgctctaaagggcactgtcctaggagtctggagacatgattttgagacttagctgttctcattggcggtatgactttgggcaagttgcttatcttttaacggtttcattttctcagttgttaaatttacagtttggtttaactaaagtctctcccagtacgagcagggcgtgagtcagagatacctaagtgtttagtgcagcgsatgtgctttctaaagtggggatggctatttacagactggcctacactgttctggtgggagccctcagtgaccaaggagcagaggtacctgaaacccacccttgaagccatctggatgctccgcttcattcaaatctggggtgttctaacccaaagtaactggccacagactgcaatgtaagatacaaatcttcaggacctagtgtrtgcacatgttggctcttatataagatggcatccttagtacttgttctatgtagaaaagaatttgtgggctcacaagtccctacagagtctcacactctcatggccaataagtatacagggatacccggaattagacaaacacagatgagacatttatttctgtatatgaatttattttatttatttatttattttttgagacagagtctcactctgtcacccatcctggagtgcagtggcctggctcattgcaagctccacctcccgggtttacaccattctgcctcaccctcccgagtagctgggactataggtgcccgccaacacgcccggctaattttgttgtgtttttagtagagacggggtttcaccgcgttagccaggatggtcttgatctcctgacctcgtgacccgccctccttggcctgccaaagtgctgggattacaggcgtgagccaccgcacctggcctgaatttattttcatttattaggaaatacctccaacacacaaaaagatgtaaataattagccgggcgtggtggctcatgactgtaatcccagcactttgggaggccgaggcaggtggaacaccagaggtccggagtttgagaccaggctggccaacatggtgaaacctcatctctactaaaaatacaaaaattagccgggagtggtggtgcacccctgtaatcccagctactccagaggctgagacacgagaatcgcttgaacctgggaggcggaggttgcagtgagctgagatcgcaccactgcactccagcctggacaacagagcaagactctgtctcagaaaaaaaaaaaaagatgtaaataataatactatcgggccaggtgcagtggcttatgcttgtaatcccagcactttgggaggccatggcaggaggactgcttgaggccaggagcttgagaacagcctgggcaacatagcaagacctcgtctctataaaaactattaatagtaatacaaatggccaggcgcagtagctcatgcctgtaattccagcactttaggaggctgaggcaggcagatcacctgaggtcacgattttgagaccagcctggccaacacagcgaaaccctatctctactaaaaatacaaaatttagctgggcatggtggcacacacctgtagttccagctgctggggaggctgaggcaggagaatcacttaagcctgtgaggcagaggttgcagtgacccgagatcccgccactgtaccctagcctgggcgacagagcaagactccatctcaaaaataataataataatacaaatatctatatatccatcagccaatttaagaataagacatgccgggcgcggtggctcatgcctgtaatcccagcactttgggaggccgaggcgggtggatcacaaggtcaggarttcaagaccagcctggccaagatggtgaaaccccgtctctactaaaaatacaaaaattagctgagcacagtggcgggtgcctgtaattccagaacctgggaggtggaggttgcagtaagccaagattgtgctactgcactctagcctgggcgacagagcaagactctatataaaaaataaaataaaaaaaaagaataagacactattggccgggtatggtgactcacgcctgtaatcccagcactttgggagccgaggcgggcagatcacgaggtcaagagatcgagatcattctggccaacatagtgaaaccctgactctactaaaaatacaacaattagctgggcatggtggcgcatacctgcagtcccagctactcgggaggctgaggcacgaaaatcacttgaacccgggaggtggaggttgcagtgagccgagatcgcatcactgcactccagcctggcgacaaagcgagactctgtctcaaaaaaaaaaaaaaacgaaagaataagacattgttgttgaagccccttaaatgtccctccccaatccttttttctctgcagtgttgaccattattatgaattaaagcttatcatccctaatgggacagttatgttttcacaggaagaatatgaaaagatgaatgtctgttgctgttacccagagacactttcacagctaaaaagacatacaaactcatactgactcaccgtctcttactcagcctcagagtgagctgcagtgttggcacacaaatacctcaacacactgctctccttctaaaatattgacaagctccgttacttatatacatggaatgacacacggtcttatccgttgaaactgtgatatgtagacacaattatgctcacatctagcaattttcagtagatacatgtaaacacacctgaatgggtaggacactgcacttgccactacattcccatagcacatcgtggatacatattgccacaatccccagggactgcaagcacactttttggcaaactgagatcaagatratagatgtaacttgtagtacccccacccaaaccctcacttccaggctatggttcacacgtccgactcatgacctgggggagctcagttctcgtctggacgtcattcagttttttctgctgccccagaatctggacatggctcagatgctgcatcggctcctgggtcacatcaagaacgtgcctgtgagcccagggtggagggcagggaggtggggaaggaggttgagggctgatactgggcagtgggcttcttgaggggcattagagtgagggaagagaaaacagcggctgtaaccttgtctgactgtagctgattctgaaacgcatgaagttgtcccacaccaaggtcagcgactggcaggttctctacaaggtaaggccttccttcttgaatcccaaaagtccaggtaaaggccctcagcctgtattccagactgtctgtaccctagacatgctgtccaattttattctaccctcttttttttttttttggagacagcctcgctctgtcgcccaggctgaagtgccatggggcgatcttggctcactgcaacctccgcctcctgggttcaagcaattctgcctcagcctcccgagaagttgggattacaagcgcccgccaccatgcctggcaaatttttgtatttttagtagagacaggatttcaccatgttggccaggctggtcttgaactcctgacttcaggtgatccacctgcctcagcctcccaaggtgctgggattacaggtgtgaaccaccaggcccggcctccctctttttttttttaactttgtattcaggaaaatgtaaaaaatatttagaataatataattaacccccatgtacccaccatgcagtttcaacactttaacttacgccaattttttttttatttctttttctttttttttttagacagagtcttgctctgtcgcccaggctggattgcagtggtgcgatctcggctcactgcaacctctgcctcccaagttcaagtgattctcctacctcagcctcccaaatagctgggattacaggtgcccaccaccacactggagtgatttttgtatttttagtagagatgggatttcaccatgttggccaggctggtctcaaattcctggcctcaagtgatctgcccatctcggcctcccaaagtgctaggattataggtgggagccaccgtgcccagcctagtatgtgtcatctatatctttttctactttcccctcttggattattttgtgggttttgttgtcgtttgtttgtttttttaaataaggtcctgctttgtcacccatactagagcagagtggtgcagtcatatttcattgcagcctctaacttctgggctcaagcaatcctcccaccttagcctccagagtaactgggactataagcctgagatgctgcacctggctttcttggattattttgaagcaagtcccagccattatatcatttcatccataaatatttcagtgtaatttcttttttctttttttttttttttttgagatggagtctcactctgtcaccaggctggagtgcagtggcatgatctcggctcactgcaacctccgcctcccaggttcaagcgattctcctgcctcagcctcccatgtagctgggataacaggcacatgccaccatgcccaagttttttttttgtatttttagtagagacagggtttcaccatgttggccrggatggtcttgatctcctgacctcgtgatccacccgcctcggcctcccagagtgctgggattacaggcgtgagccacctcacccggccaatatttcagggtaatttctaaaagaaaattattttttaaaaagaataacagtattgttatcttactttaaaaattgtattatttggtatcatcaaatatctgaaatttttcttttttgagacagggtctcactctgtcacccaggcttgagtgcaatggcacaattgtagctcactgcagcctcaaactgttgggctcaagcgatcctcccccctcagcctcctgagtagcagggaccacaggtgatggccatcacaccgaactaagtttttattttttgcttgcatttatttatttatttatttatttatttatttatttatttatttatttatttttgagacgggattttgctcttgtagcccaggctggagtgcaatggtgtgatctcggctcaccgcaacctccacctcctgggttcaagtgattctcttgcctcagcctcccaagtagctgggattacaggtgcgtgccaccacgcccagctaattttgtatttttagtagagacagggtttctccctgttggtcgggctggtctcgaactcccgacctcagatgatctgcctgcctcggcctcccaaagtgctgggattacaggcgtgagccattgcacctgaccaattttttattttttgtagagacaggatctcactatgttgctcaaggtggtctcaaactcctgagctcaagtgatcctcctgcttgggcctcccaaagtgctgagactattggtgtgagccacgatgcccagtcagatgatggccctagtcctttttaatctaccggttccttctctatcttttctctcttgttctttctttctttttctctttttcttctcctggcaatttgttgaagaaactagattattatttgtcttatagtgttttccattagcctggattttgctgtttgcatttcctagatgtttttggcacatttctctctcttctatagtttctgtaaattaatatttagttctagaagcatgattaggttcagagttttttttttttcaatactgttttagaagtagaggaacataatgtctgatatgtccgattgtctctctttttctgatgttggcaaatgttctgatgtttaatacctaaatctattattcatttatttatttatttatttagtttgaggtgagtctccctctgtcgccaggctgaagtgcagtggcacgatcttggctcactgcaacctccgcctcctgagttcaagtgattctcctgcctcagcctcctgagtagctgggacttacaggcgcacaccaccacgcccagctaatttttgtatttttagtagagacgggatttcaccatgttggccaggatggtcttgatctcttgacctcaggtgatccacccgcctcagcctcccaaagtgctggsattacaggcgtgaaccactacacccagccatctattaattctttagcaattacaaagtagtagcatttaaatctctgattctttcttcatttattagccagaaatttctgtaaagagaaacttccttttatgtactatttggttgccaagtgatagaaatcatatagaaatacagaaaattgcttgatatttcccccactcttttttttttgagacagagtcttgctctgtcaccaggctggagtgcagtggcacaatcttggctcactgcaacctccacctcccgggttgggtttcaagtgattctcctgcctcagcctcccgagtagctgggactataggcgtgtgccaccatgcctggctaatttttgtatttttagtagagacagggtttcaccatgatggccaggatggtcttgatctcttgacctcgtgatccacccgcctcggcctcccaaagtgctgggattacaggtgtgagccaccatgcccagcccttttttttttccccaatatggaacgcttcttgaatttgtgtcatccgtgcccagtggccgtgctaatccctgtaaccttcgaaatttcagtatatgtgctgcagaaatgagcaccccccacctttatttactagctatcaatatggtaaattagttccctaacattctccaagatagccatgagatttttttgttttttgtttgtttgtttgtttgtttgtttgagatggagtcttgcactgttgcccaggcaggagtgcagtggcgcgatctcggctcactgcaagctctgcctcccgggttcgcgccattctcctacctcagcctcctgagtgcctgggactacaggcgcccgccaccacgcctggctaattttttgtacttttagtagagacagggtttcaccctcttaaccaggatggtctcaatctcctgacctcgtgatccacccgcctcagcctcccaaagtgctgggattacaggtgtgagccaccgcgcccggccctgatagccgatgaggtttttttgtcattgttcttcttgtatcattacagactcatggccttttatagctatatttctctttctcccgactctgtacaaactcctttgttttagagtttgcacaaccctctatcaaagcacctaccacctcacttttaaatcttctgcatgtatttctgtcttccttcctagactgtgagcacatctgggacagggaccatatctttttttgtttatttgttttgttttgagacagagtctcgctctgtcggccaggctggagtgcaatggcgtgatctggctataacctccacctcccgggttcaagagattctcctgcctcagcctcccaagtagctggaattacatgtgcatgccaccaagcccagttaatttttgtattttgagtagagacagggtttcaccatgttggtgaggctgatctcgaactcctgacctcaggtgatctacccacctcagcctcccaaagtgctgggattacaggcatgagccactgtgcctggccaggaccatatcttaattgtctttgtagtttcagtgtttggtacagtgcctctcactgtttctttttgcctttgagatcttccctctttgttactgtgatcttccctactggtctttgttcttctgagtctgtccctatcaccacctcaacccgagctggatgtggcctgtcctcctttttgtgtttctctcacagactgtgtacagtgccctgggcctgagggatgcctgccgctccctgccgcagtccatccagctctttcgggacattgcccaagagttctctgatgacctgcaccatatcgccagcctcattgggaaagtagtgagtagaaggaaaaagggagtgcacccagggaggtcagggagagagaatgcagtgtgcaagatggggaaacatggaagatattgaggtcaattggataaagaatgggatggtgggaggaggcagcagaacttcagggaagtatctggagggtgagagttaaaggaggactgcagggagaaytggggcccaaggagagctgaggaacaggacagagggtgccaggtcctaagaaacagtacttatctcctcaggtggactttgagggcagccttgctgaaaatcgcttcacagtcctccccaacatagatcctgaaattgatgagagtgagtgttgggtgtggatgggcctgtgagccctgcgcagtgatggagtaccatccttggcaggtggtcaccacagctggggatcttcatagcaaccagggcaggagactcacttttgataaccacgtgtcttccaccctcgtagaaaagcgaagactgatgggacttcccagtttccttactgaggttgcccgcaaggagctggagaatctggactcccgtattccttcatgcagtgtcatctacatccctctggtgagggcaggagagtgggtgtagccttcagatgtmttttgggggagatattaggcttatgaaagacatactggtagataagaaaacttgtggggcagcctgaagaacatgaacacttttttgtggggatacagggatcttytaagctccctctagggtggggaggtgtccagtaagtctccaagcaggagagtagaktatctcctctttactctccccagattggcttccttctttctattccccgcctgccttccatggtagaggccagtgactttgagattaatggactggacttcatggtaagaccctcaacctctgtaaggtgagtgatgaggaaaatgagtcagcagctgaggaagagcgttactctacagcagcactgcccaatatgggatctctcctctgtagttttactctgagctttaccagcactgagacaaaggaaagagaagtcagagttaggggctggaggtggggttagaaagatggggaaggagaggaggaccaagagatgcaaagtccacagctttgaacccctgtacccagtttctctcagaggagaagctgcactatcgtagtgcccgaaccaaggagctggatgcattgctgggggacctgcactgcgagatccggggtgaggaaaagccagaggttatatgcattgtaagatgtttaaaaaaagcagcagccaggggaaggaggggagtgggcaacttggggatgcttccaacaggcccctcctcttcctgctctctgtctcgctcactctgactctatcttttcctctgaatgtcttgaggtctcagattgtatctgcarcctgtttccagatccccctaggggcctctgcctctccttcactttcccctggaactgacctccagctcccttcctcacccactcccagaccaggagacgctgctgatgtaccagctacagtgccaggtgctggcacgagcagctgtcttaacccgagtattggaccttgcctcccgcctggacgtcctgctggctcttgccagtgctgcccgggactatggctactcaaggccgcgttactccccacaagtccttggggtacgaatccagaatggcaggtaagaatagaggcgggtggaggaatagacatgaggggcccaaaggctacatcttctgggggttcatctmtcttgatccacaagccatgcgaggtgcctctccgcccactgcagacatcctctgatggaactctgtgcccgaacytttgtgcccaactccacagaatgtggtggggacaaagggagggtcaaagtcatcactggacccaactcatcagggaagagcatatacctcaaacaggtgaggagaagccctgcagcctgggcctctggcgtctcctgcatctactccacccctacttgccagccaactcaggctcctgcagctcttctcccattttctgaccccgctcttcatgaaaggaccatcacccacatccctgtgcttccacctcacatgttcttattctccactggagagccatgctctaatggaactttccgtggcccaaattccttcacctgcctctgagtaggtacacaccactcccaagtatgtctctgcccacgtcccrtgcctcttcactgattctaaattagcccacagggctatggtcaggattcggggaggagagacagagtcagtgtgtctgttacctatttctcctgtttcaccctgtccatttctctttgatgtgccattcatgccttgagcctcactttcacctcagcccacggcaccaggccccaggccctgtctccttccctattcaggtaggcttgatcacattcatggccctggtaggcagctttgtgccagcagaggaggccgaaattggggcagtagacgccatcttcacacgaattcatagctgcgaatccatctcccttggcctctccaccttcatgatcgacctcaaccaggtcaaagggaacaaagggaggtgggattgaggaaggggataatgggaaaggaacccctgaaaatgctcataacaggaaagcatgccctctgctgcatgccctttatactaaaagtggggagcactaaggtcagagataagaagaatcaatamcataaacatttcttgaacccttgtttcatgtgagtcactgttggcaaagaggatgaacaaagcgtgcacctcaccattcaagaacttgcagtgcagtagggagggcatgtatacagctttattcacaggccaactgtggtcagtgcgttacgggcttccaatactaactttcccttgtccaccttatacccagcaggtggcgaaagcagtgaacaatgccactgcacagtcgctggtccttattgatgaatttggaaagggaaccaacacggtgaggggagaaactgatgaggggagaaactaaggaggggaaaatggaggaggatgaaggagcatgacagtgaggctgggcctctggaatggaatagggctgtgtgggcagaaaagaaatagaacacgagacagggaaaggcagtgcaagtgcagaggggcatatggggtccccatggctccgaatgctaacctctgccctctttgcaggtggatgggctcgcgcttctggccgctgtgctccgacactggctggcacgtggacccacatgcccccacatctttgtggccaccaactttctgagccttgttcagctacarctgctgccacaagggcccctggtgcagtatttggtgaggagaccaatctagctcctcggggacccccaggctgggcatttcccagaggtggggattggctcctctatcagaacaagggctccctcagcacagagaccacatcccttcccttttctccctccccacaggattggccaagggtttcaggacaggaaggaggtgattgatgatacactgtcttttattctcttttaagaccatggagacctgtgaggatggcaacgatcttgtcttcttctatcaggtttgcgaaggtgttgcgaaggccagccatgcctcccacacagctgcccaggctgggcttcctgacaagcttgtggctcgtggcaaggaggtgatgagatccaaatgtgcaaccacctccacatcagagctccctttcattcctagtcctactgggcctgggtctaggtccacaggatttctgacccttatttccccttctcttccccactccccttactcctcccaccttcttgcttgttcctaggtctcagacttgatccgcagtggaaaacccatcaagyctgtcaaggatttgctaaagaagaaccaaatggaaaagtgcgtatatggccccagtgtctttaccctctctgcatcttctcctgcaactcttctccccttttcagggactcagccttcctccagcactttgcccttcagaaacccaccatttctttctgaaatccctaaatcttcaagatcccaggttttctgtgccacagcctctcccctctgcccagggatttggttgtccattctgccataaatcttgcgattttctctcttcttcagttgccagacattagtggataagtttatgaaactggatttggaagatcctaacctggacttgaacgttttcatgagccaggaagtgctgcctgctgccaccagcatcctctgagagtccttccagtgtcctccccagcctcctgagactccggtgggctgccatgccctctttgtttccttatctccctcagacgcagagtttttagtttctctagaaattttgtttcatattaggaataargtttattttgaagaaagatattgtttctttagtctcaaaacaagagactaggaaagatccaaaacacagagcaggagtccacaggggaacctgccctgcctcagtaaaaatacagtgttgttgctgtaggragactcccggattctaccccaggatacttcatgagaacgaaccccttcagagaggccctacaaaacagattagagggaagacagaggggtccaagggagatggtctctcttctcaagtaggaacaccccagcctcagacagacacagcaggaaggggcctgagaggctgacagaggcaggatgggtgcaaggcaggggtggaggggagggaccagcccgggctgcaccagtgggagtggctccacccttcccacctcagagccatggggagccagggctctggcggggtgcccttggtgcaggctccctacacagtcctgctgctgccgctggggacaagccgccaagacycaggggcccagagcttcttcctttgggtgagtatcagcccaacaagaggtcccaggggaactctctcaatagatctgccctttatatttccattsaacttgagggcccacagtgttcccgcctgcctccccttgccctccaggtcctcagtggccagtctgggttcacactcagtgaccacacagtgaacccaactaggggtggagagaaagggccataacccagagccctactgtggcgtgagagtcagcctctgtgattgcctttcccagctaygcaggatgcaggctctggagagagaacaggatgccctgtggcagggtctggagctgctacagcatggccaggcctggtttgaagaccatctgagggaggcacagcgacagcagctgcatctaggggcccttggtgaggtatgggggctgcccctctgtgtgaatggggggaggaccagggagggaggaacagggaatgtgtagacacagcctgagaccactctggagaggggagagttaatggtcagggatcatgagttggaggcagcatcgtaatgacaggatgccaccaagtgttaagttggtgttcattgttggggctggaggaagctggtctgcattccattcagagggatttggatcactccatggagatgagggtgtggcctggattattccaatggggcagggatggacagggaggctccatgaagagtagtgaaagggggtattgtgctatttgagggagatggaggaactgatgtgctaaagagatggaggtggagagtactggattttcccacctgcctgggagggtactgggacgaggggatccagatgagagggatggcctgtggtgacaggaatagagtggcagacgacctcaggttttcaccatgttgtcagcctccaactcctcctctagaattttctaacagatttacactcagagcctggtcgcccccygttagcccagattcaaaaggtgaacatctgtttgcagaatctgattcatgagaaggtgagtttattgttttcagtttagacttttgggaagttggactagagaggggagttgttggggtcagtgctggcttaacagaaaacacagcgaatttcccctccagttctccccaagtccactgaacaaggctagttcctgcaccacccaggattcaaaggaaagacgaagggagcagaacttgtggcagcaacaggtaaacttcaagaaggagggcaggagccccaccctacagggctgggaggagcccagaggccccatctgtttctcytccaggagttgtcaaggcagcagaaaggagtcacccagccaaaggaggagatggctcagcggggctgcaccaaggggccaagaggccctacccgtgtctaaaccctcctctcactcccctaagcctggtgaaagagtcagaagccccaggctcctttttctgtttcttaactcaacagctaaaaaatggctccaggtagtgagtcaatgaagttcagacatgttggtgtaaagtttctcctctgctcctgaaaacttcatcttcttggtgtctcatgtcctcattctcccctatatgacatgcaaaaacgatctttctttgaaatccctctgggaagaagcatgtttattgaaactgtccttcagccttaaatacaaaaataaaactgaaactgctccagaaagcagctttctccaaaaatgtctttggtttgtttctcatagggttaggaaaagtgcattgtgggaatatccattgccctctatcccagtcttgcagggtgttttgttttgttttgtttctgagatagggtctcactgtcgctcaggctgtagtgcagtggttcgaccacaactcactgcagcctcaacctcctgggctcaagtgatcctcctgcctcagcctcccagagtgctgggattacaggcgtgagccactgcacccagccccagtctcgaagtttctaagaaaggaaagggatgtgatggagaaagaaaaccttcattggctgggcacggtggctcacgcctgtaatcccagcactttgggaggccgaggcaggcagatcacctgaggtcaggagtttgagaccagcctggccaacatagtgaaaccctgtctctactaaaaatacaaaaaattagccgggcgtggtggcgggcacctgtgatcccagctacttgggaggctgaggcaggagaatcgcttgaacctaggaggcagaggttgcagcgagccgagattgcgccgctgcactccagcctgggcaatgagcaaaactacatctcaaaaaaaaaacaacaacaacaaaaaagagaaaaccttcatcccagctaggagaggtaaggtcctaagacctatgtgacaaatgtgtcccaggtcttcttaccaatggggcaggttgaaaatagtgctggagacccatccctttagagcccgttgtgtcaccaggaggccaggcctagcagaagcagcacccctccaactgtgccccaccaggggctgcccgcagccagccctgccccagccctgccttgagtcaccaatgtgaagggggaaaaggcaggggtggccgtggtgaggatcgggtcagatgagccggtaggggtggtgtgccggtcctgtggggaaaaggaagagaatgacagggtgtgctagagctgtactcaaattaaacctacaccaccctccccggccttgcccaccctgtgatggaaagtagtagttcctcacctgcggggctggggccgataccaggagccggaggaaagcatgagtcgggggtactgggttggcttctcgtccccctgcagtcacagtcaccatcaccacggaatccggggccgctgaatctgggacctccagccacaggcggccccaggccgactcattcagttccaggtgagccctggagagaggatataggcgtcgctaaagctccaggctgcccagagcctagagtcgggacgcctgcaggggcacgggagcggagaggaggattctgagggccagtcggagggggacaggggcagggcttgggataagcattggccgggcaagatgccagagggagctggagggttcatgagcctcacctggagaggttggaggtgagggagaagctggggttgacgaaagtcctaaggtcaagatcctgagggcccgagaagctggcgatgcggagactgagcgggactttgctgcccggggccaagaaacccgaggggccactaagctgcagagaagggttcttcagggaaggggccgctctaactctctccagccccagccgcactttcccctggcgtctcacctccagaaggacagggactacagtgctaggctgaggggcagccctgtgcaggcgccgccccgctgcgtcctggccaatcagctccagggagaagggtctaggggtggacagcagcgtgggcgacagcgaggctgcgaggagacctcgctccggaggtcccacgggctccaagggcacctggcctagttcggcaccctctgggacccctcgaaggatgacgtgggagaaatgcggctgaggatccccaggattggctctggaacccaaccctgtcacttctaccagcagctgggtctgaagacctgggacaggggcgaggaggggagaacattgtgagattcggagacacagggagaaaagaattaatggccttcaaaataggggttccctctggggagtatggatgggaaaataggttaccttcgaggggtattgatggggagcatcaggagggagttctggggtgctggaaatgttctatatcctgaactgggtgtattatatgaaatccatcaaactgtacactttagtgcacattatgtaaattataactcaatataaaagttatgcatatgcacagatgtatgtatacatatatacattatatatataatatatatattatatattatatattttatatatatatataaaactgggggttaggtgggtgggggctcagggaataaatgtacctgcaactggctgagtcagggggtagaggccagggtggggtccatcctccatggggatcccaaagtggaagaggaagtccagggaggtctgggctgggaaagggcaaaggcagtcagagcccttcctgaaaggaatgtgactgatcgtgttctctgaggcctgcagtctctgcttccccttcccaggaacacctccctccttaccttgcactctcaccccaggggtgtcctcagctgtgacctggatctcccaggttcctgtctgtggagggtcatccatggtcaccatccagaactgcccaaagcggcgagtgtgacctagaggacccccgccttcctcctggccctgggagacccctggggtcagggaagagattgtcacatgaagcacttgctctccttgagtacatcccctcgattgtctattccccggtcccctctcttccctctaccttcagaggtacctgcagggttcttgatccagaagctgctgatgtctccgtggatccggactgtgatcttctggagcagcccatccacgctgaacacaagtggctgcccaggcaccacaacaggagggtccaggggaagagtcaccttgagggattggcaggaccagaaaatggggaagaagatgaggtatgggatgaggaacaaagaagaaaggggagatagaaagaaaccacgtcattgggccgggcgcagttggtcacgcctgtaatcccagcactttgggaggctgaggcgggtggatcacaaggtcaagagttcgagaccagcctggccaacacagtgaaactacatctctactaaaaaaaaaaaaatacaaaaaattagccaggtgtggtggtgggctcctgtaatcccagctacttgggaggctggagcaggagaatcgcttgaacccaacaggcagaggctgcagtgagccaagattgtaccattgcactccagcctgggcgacagtgcaagactctgtctcaaaaaaaaaaaaaaaaaaaaaagaaagaaaaagaaaaaagaaagaaaccacgtcaaacaggcagaaagggataccagtaagagaggggcacggggccagggatgaagttattatggtcagagacaaagttggaggcaagggattcaggatgagacaatcacatcttgtgccccattaaaagatgataggccaggcgtggtggctcatgtctgtaatcccagcacctgggagaccaaggcaggaggatcacttgaggccaggggttcaagaacagcttagtcaatatagcaagactctgtctctgcaaaatacaagccacctccccaaaaagatggtaggacttcctgtggtaaccctggaggcagaatactggaagccaagtggggagaggtttactgatataaaaggacaatgcaggccaggcgtggtggctcgcgcctgtaatcccagcactgtgggaggccaaggtaggcggatcacttgcggtcaggagtacgaaaccagcctggccaaaaaaacggtgaaaccccggctctactaaaaaaatacaaaaattagccaggcctggtggtgggcactggtaactctagcgacttgggaggctgaggcaggagaatcccttgaacccgggaggtggaggttgcaatgagccgagattgtgccactgcactccaacctgggtgaccataagactccatctcaaaaaaaaaaaaagaagtggctagtcatggatctaagaggaagagaaacttcctttcctgccccgtgactggaagaacaacacagcagtgagagtgattcccctttctcctataagaagagaggtgcagcctgaccacccttcagttcctaagtgagggccctggcccccacttaccagggcagccatgctctccccaacaatggctgccacgtctcgaatgtgctggtctttggtgaagatcacctctcctcctgaggccagggccactgctttgtatggctcaaaacgcagaggggacaagatctcacgccgagctcgaccctgaacccttgatgtatcttcagtcaccaggaatgttacctgtacccagaagagagctcagtgattggggtgtccaagtgccatccactattatgaatgagaatccctgtgctcaagctttctccagagctgatggtttgtgataaggtctctgcctgccttctggctgctggggtggggaatcccaatgacagaaccccctgccttcagttagtagttggccacccccttgtaactgtcacagtggatttttggcgactagagccccagttcttcacattgtttattaggcagggtcaaataaaaattcagcgttattaagggtagggcctcttacgtatatcattaaaggtatcaggaaatgttccactcattgtctgcttctcccaccatataccaaggcttgttgggccaccatagtgtggtgcaaccctcgttatgagattgtcatcacagggtctctcacatccctgggaggctaacactgggtctcccactagctctgctcacccggcagcgccgctcctgagtcagggattccacctggttggtgagaaaggcatccttgggggaggcatccgtgaagacaaagatatctgagagtggaggtgtgtgcagcagggccagctggcagggaaggcaacgaccagtgttaacaatggcagtaggaggggaatgggtagagccacggaggatgaagcagaagggaatatggcccgggaaccctacagtgaagctagtggatctaggtgctgaaggtggtggggagccccaggagggatctagctccccctggtggtggggccaggaaacggggaagaagggaggggccagacctgcagggctgacaggcacatctcaggctcgtctccaccccccaaggcatggatctcattaagctgttgccagaagctgtcagggtcactggttgtaaagacagggccgaaccctgggaaggggaaaggaggttaagataagtgaggaaagagctcccctcattcttacccagagccacctccccagttgaggggcctggtgtgcttctggagccgacaggtattgaaataacaatactccattataagactcatacttggccgggtgcggtggctcacacctgtaatcccagcattttgggaggccaaggtgggtggatcatgaggtcaagagatcaaaaccatcctggccaacatggtgaaacctcgtctctactaaaaaatataaaaattagctgggcatggtgatgcatgcccgtagcctccccagtagcctccccagaggctccccagtagcctccccagctactggggaggctgaggcaggagaatcacttgaacccgggaggcagaggttgcagtgagccgagatcgtgccgctgcactccagtctggcgacagactctatctcaaaaaaaaaaaaaaaaagtcatacttgtcagtgcagggcggggcagggcggggcagggcagggcagacctaggtgtccctggtgggaaggtggcctccactccctgaaaaaaatggtggcatttcctgtaggcctttattggctacatgtgcgtatataaaaaaaaaaatggtcacacctattatcccagcactttgagaggctgaagtgggaggatcacttgagcccaggagctcgagatcagcctgggtaacatagtgagaccccatctctacaaaaaaatacaaaaattagccagatatggtggtgctcatctgtagtcccagctactcaggaggctgtggcaggaggattgcttgaatcgaggctgcagtgaggcatgattgtaccattgcactccaacctgggtgacagagtgagactctccctctctctctctcaaaaaaaaaaaaaaaagaaagaaaaga

SEQ ID NO: 97061 - DNA, 32668 bp, Homo sapiens
gctggccgggcggggggggctgaccccaccacctccctcccagacggggcggctggccgggtggggggctgaccccccacctccctcccggacggggcggctggctgcgtggggggctgacccccccacctccctcccggacagggcggctggccgggcagaggggctcctcacttcccagtaggggtggctgggcaggggcgcccctcacctcccggacggggtggctggccgggcagggggctgacccccccacctccctcctggagggggcggctgccgggcggagatgctcctcacttctcagacggggcggctgccgggcggagggtctcctcccttctcagacggggaggctgggcagagaccctcctcacctcccagacggggtcgcggccgggcagaggcgctcctcacatcccagacggggcggcggggcaaaggcgctccccacatctcagacgatgagcggccgggcagagacgctcctcacttcctagatgggatggcggccgggcagagacgctcctcactttccagactgggcagccaggcagaggggctcctcacatcccagacgatgggcggccaggcagagacgcccctcacttcccagacggggtggcggccgggcagaggctgcactctgggcactttgggaggccaaggcaggcggctgggaggtggaggttgtagcaagccgagatcccgccactgcactccagcctgggcaccattgagcactgagtgaaccagacaccgtctgcaatcgcggcacctccggaggccgaggctggcggatcactcgcggttaggagctggagaccagcccggccaacacagcgaaaccccgtctccactaacaaaatacgaaaaccagtcaggcgtggcggcgcgcgcctgcaatcgcaggcactcggcaggctgaggcaggagagtcaggcagggaggttgcagtgagctgagatggcagcagtacagtccagcttcggctcggcatcagagggagaccgtggaaaggataattccactattacttgtcttttggggtttgtttttattctctctttgagttttgtttccttatgcgcccagttacttttgaaaatgttctgggcagatttgcctagattaataaatgccctccatgttccaattacttttttttttttgagacagtgtcttaccctgtcaccaagctggagtgcagtggtatgatcttggctcactgcaacctctgcctcctgagttcaagtgattctcctgcctcagcctcccaagtagctggcattacaggcacctgacaccacgcccagctaattttttttttttttttttttttgagacggagtctcgctctgtcacccaggctggagttcagtggcatgatcttggcttactgcaagctctgcctcctgggttcacccattctcccgcctcagcctcccgagtagctgggactacaggtgcccgccactatgcctggctaattgtttttttttttgtatttttagtagagatggggtttcaccgtgttagccaggatggtcttgatctccggacctcgtgatccacccgtctcagcctgccaaagtgctgggattacaggcatgagccaccgcatctggcctatttttgtatttttaatggagaccgggtttcatcatgttggccaggctggtcttgaacttgaacttctgacctcaagtgatccacccttagcgtcccaaagtgctgggattacaggcatgagccaccgtgcccggccccagttatttttatttttattttttgagttagagtctcactctgtcacccaggctggagcgcagtggcatgatctcggctcacagcaactttctgggttcaagcagttctcctgtgtcagcctcctgagtagctgggactacaggcacacatcaccacgcccggctaatttttgtagttttagtagagacggggttttaccatattggtcaggctgatattgaactcctgacctcaggtgatccacccacgtcagcctcccaaagtgccgggattacaggcttgagccatctcgcccggcctacttagatgttatattagtggtaattcctgttatcctgtgagctctttagtgtctaaacaattttttttaagagatggggtctcactgtgttgcccagttgcaatcatatcttactgcagcctcaaactcctgggtcaagtgatcctcttgccttagtctcccaagtagctaggaccataggtgtctgcccccacgcctggctgtttttacattttttgtagagatgtggcgggtgggggggtctcactgtgttgcccagactggtctcgaactcctgtcctcaattgatcctgctacctcagcctcccaaaatgctgaattacaggcatgagccactgtacctggtcttaaacaattttaaaataacatttttatccaggattttagttaattttcaacaggtggattagttcttgctgtattctcgtaaacagaagtcctggtttatttttatttgttttaaacattgaatcccatactcctccccaccttaccctacccagaatttagactgttaatgttttgaagccacagcctgcatcttaatcactattttatcttagtgcctggtcttagaaattatattgactctttgatagaccatatataaggcaggtggatgagaatgtgggtagctagttggaaaaggctgcttggtcatttgcttgattattttctcacacagtttttcctttactaagagaaaatgcccccatattggcaaacaaaatctccctgcctgagagcgcccagagtatagcagagcatcttaccctgatacgcctcttttcactctcttctctgtggagacagaaggagcttcaagagcagggggagatcagaatcgtccagctgggcttcgacttggatgcccatggaattatcttcactgaggactacaggaccagagtatgtgactgtgtgcgtcaggggtgctggggggagggcacaggttgggggagacagggaagttgggaaacagaaataaaaacaaaagaaagaatttccctgcccccacatcccatggagagggcacagggccctggtaaatagtaatatgagggagagagacaggagggaaagagggaggagtgagagggtaaagagggggggagaggagggggaggaggaggaaggaaggagggggaggaggagggggggaggaagagggggaggaggatgaagaggaggaggaagaagaagggtatgagaggtggaaggatctgagcaagaggtaagacaggaagagaaatgctgtcctgggggtggaggttggtagagagtgagggtggggatggaccatgtctctcatctctgcttgtaggtcctcaaggcctgtgatggccgaccgtatgctggggcagtgcagaaatttctagcttcagtacttccagcctgtggggaccttagtttccagcaggaccaaatgacacagacctttggcttcagggactcagaaatcacgtgagacttgtggaaccaaccaaagtcaggcatctggtgcttccctgcctccctccagttccatccagcctgtcctcctgtttttttggtgaacctgccagaaaagctgccaaaaagctgactcttctttttaataaaatgacccaagtttgtattcctccccacaagagaggaggcctatcttacctgggccttagaaagagccctgaaatagaattcagttcttggtggcttatcaaaagcacacaggggcctggcaggaagtgtaaaagcttgatgttaatcatactgggactaagaggatagagaatggtaggagctgggatacccctaaacattcacattaaaacaaaaaaaacccaaagctaaaaaacaactgggcaggagctaaataaaaatctaattttgagaggctgtatctggctcaggcctcctactttgtaacccatggaatatgtgaaagcatttgaaaaactatagcactgatctcacatgggcagacacactctcagagagatgtggtgggagccatggcgcagtctgcctaggcagtggcaggagcgcagaagactctgattcctctcctcggtcctaagaccgaatgtgtgtcaggacatgtggtcagggaagagaagctatttaactgaaccagtaatagtagcaggaaaagaaaaagtggagggagggcagtccaggtagggggcctggaacaagcaactgcaccaacagaggcagttggtgcgagcacagaaccaccccaggctgggattttgttatccagtctctcttgcatggttgcccgtgtttctggagacttgtgtaaacattaatggatgaggaggagagatggttctcagagcccagccctcatctctgctggcttcccactgccctcaggcatctggtgaatgctggagtcctcaccgtccgagatgctgggagctggtggctagctgtgcctggagctgggagattcatcaagtactttgttaaaggtatcccatctgcagctcaagcctgcagcccctcaccttttggtggctcctcaggcctctaggccttattcacctttcccctttcctgtgccacttctcctctagggcgccaggctgtccttagcatggtccggaaggcaaagtaccgggaactgctcctatcagagctcctgggccggcgggcgcctgtcgtggtgcggcttggcctcacctaccatgtgcacgacctcattggggcccagctagtggactggtgagtctttccctggcctctggcagattatggagcaatgacccaaagtgggatttcctcccagctcatgcttagtttcctagtgaaggccagtggctctcattcttctctggaacccgggagcaccccttcccaagttctaagttctcctcacagcttgagcctaggcgtctggctccagccttgtctttctcctgcacagcatctctaccacttcaggaaccctcctccgcctgccagagacatgaagattctgctcatcattgctcagctcctcagagtgggccgggaggggactagaagagctgcatgatggtggctgagacagggtcaccttgggaaggcttgggagccaggatgagtgtcgggctctcgtgtgtgcaaaaggtcagatgtgactgctgctgtttgcctggtttctgacccagtggtggggtttgagcaatgcttctctgcccttccatggaaagtggaaccagaaatggtgccaaggctgtggctgttccctttcgtgtaaaatggtgctgttattactctgtcttgaaataggaaggtgggatttctggggaggctggtgaaggagggcagggttcttttctctacgtgtcatgttaaaattgccaaataaagtacctctgcctgtgatattttctggatgtcctttatttactgtgacgtgtgtttgggtgccttgtttaggggtagaggtgaagtctgagctttgcctcattcagagaggaaaggggtcaggggttcactctgacgttcaggccattctccctgtggagtggtgagggtgtacctaatctcctaaaccacggaatttctgttagggcctaaaaaagcaaaagcctagtatagttcaatttgtgttggaatgaaagtaagagacaagtgtcttagaagcctgtcattgttttgtgagggcctttaaatatcctgtactcgtgggccatgttgggcccttgtacgcccaggtatacatgagcttgtgtgcacctataccctgatacagatatacctggtagggggaggtgctcaggcactggaatgagaggagttaacggggaaggacagggttatttctgggccaagattcagagtttcccatggacacccaggtgtccggggtgcccccacaactctgggcctgaggccagttgcacttcttggctgtcacgtggtttcccagcttagctgggctgggggaggagcaaggtccagagtcaactctgccccgaggcctagcttggccagaaggtagcagacagacagacggatctaacctctcttggatcctccagccatgaggctgctctgggggctgatctgggcatccagcttcttcaccttatctctgcagaagcccaggtcctggaggcgggatgctgggtgcttggattggggcagggctggcatcgggacccgattcaggagtgagggagagcaggggtggaggtgtcagagcgaagtctgactgctgawcctgtcykytctccccaggttgctcttgttctctccttctgtggttcatctgggggtccccctatcggtgggggtgcagctccaggatgtgccccgaggacaggtagtgaaaggatcagtgttcctgagaaacccatctcgtaataatgtcccctgctccccaaaggtggacttcacccttagctcagaaagagacttcgcactcctcagtctccaggtaaccagaccccatgccctcctgctgcttgtgggggcctcctgccctgttcccatctgtcttgtaagtgtcatcatcttcccactggcctcctcccctcctgtcttcccaccctggcattctccttccacgtttctcccttggtctctgtcctttttggtcagctgtctcttgctctgtgacccgctccctctccctctccctctcctgacaggtgcccttgaaagatgcgaagagctgtggcctccatcaactcctcagaggccctgaggtccagctggtggcccattcgccatggctaaaggactctctgtccagaacgacaaacatccagggtatcaacctgctcttctcctctcgccgggggcacctctttttgcagacggaccagcccatttacaaccctggccagcggggtgagtctcagccccagggcctcaacctttaaccccctccgagccctctcaggatgagtttggtgccccctaagtgagataacctgaaagaaagtgccacacagaaggggtgcttaggaaacatttgtcccctgctccctctgtggagtttgacccaccctccccttgcacatggacccctgctcacctctctcctcctccactcccagttcggtaccgggtctttgctctggatcagaagatgcgcccgagcactgacaccatcacagtcatggtggaggtgagtccccgacctctggmcttcctgatcctggccactgatgtgacctcctgcctgtgagcacttctccccttgcagaactctcacggcctccgcgtgcggaagaaggaggtgtacatgccctcgtccatcttccaggatgactttgtgatcccagacatctcagagtgagcgctcccaatgtgggggctgcccccaagctacaccaccccaattcctgttaggctctccacctcccacacagaggcacgtccccagatgccctgaccctcagcctcctgagcctctggttaacccccacagtcctcttcccagggaagcaggctgctggctctccgtgccccactgtacagatgggctgagccccttccttgtccattctcaggccagggacctggaagatctcagcccgattctcagatggcctggaatccaacagcagcacccagtttgaggtgaagaaatatggtgagagctggaaactggagggacaggcagctgctttcctgaaggaaataagggtggaaggagaggtactgggagcagctcagggcagggagatatgggtgccacagccctgagcagaggggagtctttgagctggagtctgacctgcctatcccttcaccctgggtcagtccttcccaactttgaggtgaagatcacccctggaaagccctacatcctgacggtgccaggccatcttgatgaaatgcagttagacatccaggccaggtaatacctccctccccacctctgcccaccagcaccgggtcctgctccctactcagtatgaatgggctcctgcttccctgccctcgggccattattccccccagcccttggcccaccctcttctctctgccacgacaggtacatctatgggaagccagtgcagggggtggcatatgtgcgctttgggctcctagatgaggatggtaagaagactttctttcgggggctggagagtcagaccaaggtaggaaggagaataggggctggggaggggaaggggcaagggaggtgaggtgggagactcagtctcaccctatgtcctgtttctttctatgccccagctggtgaatggacagagccacatttccctctcaaaggcagagttccaggacgccctggagaagctgaatatgggcattactgacctccaggggctgcgcctctaygttgctgcagccatcattgagtmtccaggtgggtgactttcccttattgtaaccccagacccttgcctctgacctctgagctaaccctctgtcctccrgcaccaacaccaccccacttctcacatctcatctcagactcaaaaccaggaaacacccaggagacctggtttctctccaactctgtctctgtgactcggcccttttccctggctgagtttatttatttctttgctcgttctgctcattccttcactcctccagtggacatgtgttgttcaatgccccgtgctaggcctcagcatgcacagacatgttggggaccagcctcaacgccacccgtagggttcctgaagtccattggtgacacaggaatgagaagagacaggttaagagttcataaagagtgggggccagggggccaattgcaaaatggaggctgcaaaaggctcagagctctggtctccacactattttttgmgtacagtcactcagatctaagaagcagatgttcagggagaaacagtgaaagggaggcagtgggtcataggcgtaatctatagcaatasagttttaaatgaatctcctttgtgctcaaacagcatgtctttaaattatcggagagtagctggtggaagtgggcttagctagragactgcatgtctgtccaatgcttcaaaggagggtctttctccttgaacasagtgtttacagataagacagggggtctcactctgagcatgggaacatgatggcaattaggaggcttttcttctcagaggcctcttgtggctttccacaayttattgtctcatatttttatggmcagtttatacaggcaccccacaagtccttttcccaacatgcccccctccstttttttttttttaaccgctattgctattatggcttatttgtggtgtttggtctgttttcagaagtgtcttttgcatctgtagactaaaagtaaacagcataaacagatacacattaaagtaaaatttgtaatagttgatcmtttaatggtcttaatctgtttaagaggatttatrtttgaaagtccgtcagtagctccaatgagaatgtcagtctcaggcaggagggttaaatgagcctgagatgctttaaaaacctgtttttttaaaatttggttatatttaatgttaaatttttatttttttcttttagatgatgtctaactttttaaaaatgatgtttagtagtattatacgaatggggagttatgtagaaattggaagtatttcaattacattgtacttctaattgatgttttaagtttattgtacgatcttccatttaaataacagtctgtctaagatcatttgtttgatttgtcaattgttggtctatttgggtctgagaattccacaattttgaggaattttttgttaactatttatatattttgtagtttgaacagaggagtgtaaagcaattccagcagccgcagcagtagctgtgactgcaataaggcccataagactgttataagggtaaaaataaatctctttgttttggtaaacacttttttttaaaacatttttgtgacaatatgaatggaaggagaggctttctaaggtctattgagggaaaccagtatccaaactcctttcttagtttttatcagtaacacagatgtttttacaccgaacgtggaattaatacaggtgaaaaggtgacagttttgacaagtaatagtttgagaattaggtcgaatgtcaatatttttgaccattaacataaaaggagggttgacacaactctgaatgggcactgttttgttggaagaaaactgatacgcaaattgaagtttttaaccttttttttttaaagataatatatttttttctaaacttaaatatgagattgggccattattaactttcataatttggagtgtttagggcctattattggattaattattttgggatgtgggccagctgtactaaaattggtccaaattatgggaaaatgagcacgtttttcagtgtaagtagtgttacctttttgatagtatagtttctgttttagttttgtcttgtatttattattttgatgggtacaattaactgtaaaggtcccctcaggggaccaattaatgacaatttcataggaattattttgtagtaccatagtgtgatcagagatgtaattttttttaattaatatttttaaattatttgaccattgttaaggttgttggcacctcttttttgggggcttaaactgttaattgaattgaactctgtgaatgatccgggctccatccagaaaataaatgataggatactggtctttgattatgacctggaattttaactagtcaatgttgtcggtagccttttaggcaaccgatagttggccttatgtaaagaggggggaactgataacctatggacacatttattaacttttttttttttcctttgggtgagagggcccatgagtatttgtaggcttagggatccaaacgctattattaacataaacttcaactgggggttttaaccatgtgacaggcctaattaaaggcaggaatgggacacatgcccaataggtataattttgggctgttgtagccacaggtttgttaggcgaggaggtcactgtttttattttggctttgtattctaggattagtaaataacagaagacaaacatgagtataattagtaacttttttttttagtaaaagagtgacctgtagtgttacttggcatcttagtttactatatgttattaatgaggaaccccactgggggtatgttaatttattctagctaagcagttatgttattagaagctgagaagggggtgtttgttaaagtaacagggcagaagaaaggcggatttaagatacgagcttaatacagtgtagcaggtataggtagtaggcaaagtgagagaattaaaaatgaataaattatttggcttagacttttgtttttttagtataatgtctgaggcctgtgttgtttgtggaagtcgcattgttgaggctgtagttcctgtagggtcttttttaggctggttcaaatgtttttttattttttaattttttatcctttgatgaggatgtagtctttaggctggtactggaaattttaggagtggcgtctgtgttaagagactttttacaatttttaaagagcaggttagtgttttaagaaaaacttgtgttttattttaatgtttagtttatagaaaactggatgatatctttttaactttagtaaataygtttacacacggaattttttacaattatcattttaaaacttgtttagatctttaaaacaaaattaaacaaccttttttrtataaattttttataactttttttatgacttttacagacaatttttaacatgtcttaactttttatgttttataatttttttactaaaggtacatttttataactttttaaatttttttacttttttgtatttttttgatttttgtcttagtcttttttttacttttatttttttaaatgtgtaataattagatgagtgttggtaacaatggatrtatgtacatattttagtttttaaaatttagggatgtgtttaacatctgtttgccagaactgactaggttccaattctttacggttaacacctattgaaggagggtatgtgcctgtgagctggtaatctgggcattgtgggataatttgtttagccagcctctgtgtaagttgaaattatttagataagtttctccaattttggtggaataatcgatgtgattgggtggcttggtcaagcagtgatgtcataacctgaaggtctgcttgattattgccgtaagccaatgggccaggcagagagctgtgggctcgaatgtgtgtaataaaagtaggatgtgtaccttggtctagtaattgttgaagttgaagaaaaagaccacacagagtgggctccagagcaaacttaaggctgtaatagtttttaaataaatacacagaataaccttagctctctgaatgttagtaaattcagatcaagtgattggattatgtggtctccaccagactgttgctttttcatgtttaccagacccaccagtaaaaacagctatggctccttccaaaggggcatcacaagtaatttttggaagaacctatgtagttaattttaagaattgaaaagtttttaggataatgattattaatacatccaacaaattttgttaaattaatctgtcatgtaactgagttaataaatgcctgtttaacctgatttttatttattggaactataatttttattgggctcagtgccacaaartttaataattcatatatgagcctgtccaattagaattgccatctgatttaagtayactgtaagtgcttttatggtattatgtggcaaaaaggaccatttaactaaatcatcattttgaacaataacccccattattgtgtggttagtgtgaagtagggaacacaatgaattataaaggcaagtctgagtcaatcctactgacctgggcttgctgaattttgttttcaattactgataactctttcatggcctcgggtgttagttctctgttactgcgtaagttggtatttcccctcaatattgagaagagattagacatagcataagtaggaattgctaaattgggccaaatccaattaatatcttctaacaatttttgaaaattatttaaggttttgaaagaatctcttctaatttgaaccttttgaggcttaatggctctatcctgtacttgtattttcaaatactgaaaaggagtggttgtttgaattttgtcaggtgctataagtaattcagcatttgtaattgtcttttgcaaagattaataatattgaataagttggtctctactttttgctgcacaaatctggaaactgatctctaacaggctggakagttctgcctacaaaagtttgacaaactgtgggactatttaacataccctggggcaaaactttccaatgatatttggctgcaggttttttgttattaacrgcaggaatggtaaaggcaaattttttgaaatctgcctctgctaaaggaattgtaaaaaagcagtcttttaaatctataataacaagcggtcagtctttagggagcacagtgggggatggragcccaggttgtaaggctcccatcggttgaattacagcgttgacgccatctaccggactttttcttaattacaaatactggggaattccaaggagagaaagtgggtgaaatatatcctttttttagtagtttattttataaagcacccccaacttttccttagggagcggccactgttcaacccagacggggcgccgggtcatccattttaagggaaattgctccttcactgtaataactgtagggtgaacctgaattgccccatctccataatgaactgtgggtcgggcaataatgggcacggtgagccaagtctcgggctccctccccctgcacccactcggctgaggaggaggtggccattctggacattyctctacaggaaccgtgggctgaacaattttttgagtaggtttagggagactggggagattggcataaatcatcttcagactctcctttttgttagtactcggtagaggtggttcagagttctgattatcaaactcctctctctcctcctctgactcagcctcattatctgtctgaaaaggctccagtgctgcatgcaccaatgaccaaagcgaccaaacaggcaaaggaatttcctttccttctctatatgctcttttaaggtcctttccaactccttcttaatgttttaatttcaaagtttcctgttttgggaaccaagggcaaaattgttccatagcatgaaacaaatccataagattttccgtatcaacttttaccccaccatgcatgcttgaagagctgccgtaggaagctcaaatacgtggtgtacttactttcagtttttcccattgtgtccctagctttctctgggcgccccgcttacctgtagaggttaaaacttttatgtccttgggagtcctttgttcgttggtcctctgtttcacatgcttgagcgtttcctcaccagattcttttgggccccacgttgggcgccagaatgttggggaccagcctcaacaccacctgtagggtacctgaagtctggtggtgacaaaggaatgagaagagacaggttaagagttcataaagagtggaggccagggggccaattgcaaaatggaggctgcaaaaggctcagagctctggtctccacactatttattgagtacaataacttagatctaagaagcagatgttcagggcaaaacagtgaaagggtagcagtgcgtcacaggcataatctacagcagaagygctttaaatgaatctcctttgtgctcaaacagcatatctttaacttrtcggagagtagctagtgggagtgggcttaactaggagcctgcacgtctgtccacattccaatgcttcaaaggagggtctttctccttgaatacagtgtttacagataagagagagcaggtctcgctctgagcatggcaattaggaggcttttctcctcagaggcctcttgtggctttccacaacttattgtcccatatttttatggccagtttatacaggcaccccacaagtccttttcccaacacagacaggaatacggcagcctgygccctgggagctcactgtcttgtgggagggaaccactcaagccactcccyacttgtcctcctgtccctctcttcttgggctctgtcccccacctctctctgtcctttgtcttgcaggtggggagatggaggaggcagagctcacatcctggtattttgtgtcatctcccttctccttggatcttagcaagaccaagcgacaccttgtgcctggggcccccttcctgctgcaggtttcttccagaggggaasgatgagtagggaggatgtggtagttaggagggctcagggtctgaccactctcttttgcctgmcctcctttacctgmctaggccttggtccgtgagatgtcaggctccccagcttctggcattcctgtcaaagtttctgccacggtgtcttctcctgggtctgttcctgaagtccaggacattcagcaaaacacagaygggagcggccaagtcagcattccaataattatccctcagaccatctcagagctgcagctctcagtaggaytcctcggmcccctgggagatggtgggggaaggggaggagggtgagctggggtcccaaggatccatggcctgacttggggggaaggtggggtacttggctctgagctactaccctattcgcacctgaccccctctccaggtatctgcaggctccccacatccagcgatagccaggctcactgtggcagccccaccttcaggaggccccgggtttctgtctattgagcggcyggattctcgacctcctcgtgttggggacactctgaacctgaacttgcgagccgtgggcagtggggccaccttttctcattactactacatggtgtgcatgagctggggagtcamggagggctggggtgcagggaagagccctctgggtggggctgggggggttcaaggctgaggctgtcccatgaagaggcaaccactcttgtccctcccattcttggcccagatcctatcccgagggcagatcgtgttcatgaatcgagagcccaagaggaccctgacctcggtctcggtgtttgtggaccatcacctggcaccctccttctactttgtggccttctactaccmtggagaccacccagtggccaactccctgcgagtggatgtccaggmtggggcctgcgagggcaaggtgaccggggtcaggagagatggcacttgtgccgagggggttgaggacagggtgattgccaacagggcatggatttagcttgggggcagtgaggataccgggactgaaggaagctctcccactctgaccgcccccacctgccgcccctgccagctggagctcagcgtggacggtgccaagcagtaccggaacggggagtccgtgaagctccacttagaaaccgactccctagccctggtggcgctgggagccttggacacagctctgtatgctgcaggcagcaagtcccacaagcccctcaacatgggcaaggtttgtccagaccctctccacagctctctcacccctccatggctcatccccctgcttccctgagccttgggcgcagcccctggatcccactgaggctccccacagtctcttccccacttggccctgtggtctccatctcctggctctgtatcctttcctatccccccatgtgctgccctctcacctgtgccgagtgctcagtcctgcccctcagccacacttggctcctagcattcctgcctttcttgcaggtctttgaagctatgaacagctatgacctcggctgtggtcctgggggtggggacagtgcccttcaggtgttccaggcagcgggcctggccttttctgatggagaccagtggaccttatccagaaagagtgagaacagagaaggaaggggagtgggtggcgggaagataaggaaggaggaagggcctgaggggaccagctggaagagtccgggcaggaagggctgggcaggggaaggggaggaggggaggaggccgagtgcctgacggctggactgcagcctttctctctaccaggactaagctgtcccaaggagaagacaacccggaaaaagagaaacgtgaacttccaaaaggcgattaatgagaaatgtgagttgcgggtgcctaggcagtagcttgggctctccacctgggatccgggttgggggtctkcctctctgcccctcrgctccttgctgaacccacgtgtggtatttggggccagagatccgaattccgggattacgagtggaaggtgggcagctctctccagcagcctctcttatgttgctggtctcaaggggtcggggcgggkgctgaggtgtatgtcctttttgtcctctcatgctcacccccacctggccctgcagtgggtcagtatgcttccccgacagccaagcgctgctgccaggatggggtgacacgtctgcccatgatgmgttcctgcgagcagcgggcagcccgcgtgcagcagcyggactgccgggagcccttcctgtcctgctgccaatttgctgagagtctgcgcaagaagagcagggacaagggccaggcgggcctccaacgaggtgaggggctgggtggggctagggcacaggtggcggcgcttggaaaggcagaacggtcccctcctcactcccgtccaccgtggtcccccagccctggagatcctgcaggaggaggacctgattgatgaggatgacattcccgtgcgcagcttcttcccagagaactggctctggagagtggaaacagtggaccgctttcaaatgtgagagtgtgtgccggcccggccttttctctgtgctgtgtctcggggccagccggggtagacgggccttctctgcctttccctacacagattgacactgtggctccccgactctctgaccacgtgggagatccatggcctgagcctgtccaaaaccaaaggtgatgtcaccctgtctgggcctcaggtgacccygmttccatttccctgtaccccagctccctgtyccctttgctcttagtgtaggaagagggtccagtgatctggggaggtctgtgycagcgtgcagmtggcgtgggccagagggcagaggcggactgagacagagctgggtcacccccacccctccctcctgtggccctgaagctttgatggcccctctratctctgcccctgtgcccacgcttcctttccctcaggcctatgtgtggccaccccagtycagctccgggtgttccgcgagttccacctgcacctccgcctgcccatgtctgtccgccgctttgagcagctggagctgcggcctgtcctctataactacctggataaaaacctgactgtgaggccccatrggagcctgagcatacaggagttgggggagccagggcccagtgaggggtggggaggctaaccgggccaggactctggccatcctcgttttcctgccctcaggtgagcgtccacgtgtccccagyggaggggctgtgcctggctgggggcggaggkctggcccagcaggtgctggtgcctgcgggctctgcccggcctgttgccttctctgtggtgcccacggcagccrccgctgtgtctctgaaggtggtggctcgagggtccttcgaattccctgtgggagatgcggtgtccaaggttctgcagattgaggtgaatggagcacccctgaatataagtccccgggccccyagctttgtcctccaccctcagcactctctctgctrgccaggccaggggcccaacacccraaccaatgccttggtctgttcccatcttctacaattctgatccaactctgtccctggagttgaaactcaaagttctgggggagtctgygctagcagggcaggctgtagtcctgtgtgacctcacaaccatgttttccctgagacagaaggaaggggccatccatagagaggagctggtctatgaactcaaccccttgggtgagtgaccctctacctccagccattggtttcctaagtgggtacaggtggtgggggatgtggacagcaggacaggctgccaacttccccmatttccccagaccaccgaggccggaccttggaaatacctggcaactctgatcccaatatgatccctgatggggactttaacagctacgtcagggttacaggtgggagtgccctttagtcccttcccagtggccaccttcggattcatgtgggacytgtggatccctgcttggtcccactccccgtgagcctctgacacagagtcctcagacctcyaccctctccctcccatgtagcctcagatccattggacactttaggctctgagggggccttgtcaccaggaggcgtggcctccctcttgaggcttcctcgaggctgtggggagcaaaccatgatctacttggctccgacactggctgcttcccgctacctggacaagacagagcagtggagcacactkcctcccgagaccaaggaccacgccgtggatctgatccagaaaggttctgggtgcaagggcaagcaggagggggkccaggaaaggacagttactggaagatggacagcccaggaggctacagagggaaagaaagggggcccctgatgaggatggggagcatggccttgggctcaaacagcagaagggtgagtgtcacctgagcggccacctctcctctccaaggctacatgcggatccagcagtttcggaaggcggatggttcctatgcggcttggttgtcacgggrcagcagcacctggtgagcttgggagagtggttccagggttctgagggggtcagggctggggcaggggtgggacagagctggtatgatgggagggtggataaccaggcacctgggggcgtgggcataatgagaagcaagtccttatccccaaccctcctttcctgccctccaggctcacagcctttgtgttgaaggtcctgagtttggcccaggagcaggtaggaggmtcgcctgagaaactgcaggagacatctaactggcttctgtcccagcagcaggctgacggctcgttccaggaccyctstccagtgwtasayaggagcatgcaggtgcgggcatgctggggctggcccgagaagcgcctgtcggaggactctctttgccccttccccctcctgtttgacatcttttctccccttactaggggggtttggtgggcaatgatgagactgtggcactcacagcctttgtgaccatcgcccttcatcatgggctggccgtcttccaggatgagggtgcagagccattgaagcagagagtggtaagttcagtggcgtttctgccctctgctggcccccagctctctccctttttcctcaggaacccaggggtccaggcccaagaccctcctcccgttttcttccaggaagcctccatctcaaaggcaarctcatttttgggggagaaagcaagtgctgggctcctgggtgcccacgcagctgccatcacggcctatgccctgacactgaccaaggcscctgyggacctgcksggtgttgcccacaacaacctcatggcaatggcccaggagactggaggtgaggggtgaggsgctctggcagtgagcctgaggcccaggggaccttaggatccctgagtgtgcccagagggagaggctggatgaagactcagaggaggaatgaagttataagcaggggtgggttgggggagactcaggagagcccagcagggggtggctaagggccaggggaccaggctcttctccctgccttcctgtttactygtggtctcccttcactttcagataacctgtactggggctcagtcactggttctcagagcaatgccgtgtcgcccacsccggctcctcgcaacccatccgaccccatgccccaggccccagccctgtggattgaaaccacagcctacgccctgctgcacctcctgcttcacgagggcaaagcagagatggcagaccaggctgcggcctggctcacccgtcagggcagcttccaagggggattccgcagtacccaagtaggggccgtccccgggctctggsgggggtgggtagtcctcagaccaagggcttgcttgagtcctggctcaacctccctaggacacggtgattgccctggatgccctgtctgcctactggwttgcctcccacaccactgaggagaggggtctcaatgtgactctcagctccacaggccggaatgggttcaagtcccacgcgctgcagctgaacaaccgccagattcgcggcctggaggaggagctgcaggtgaaccactccctggtgaaccactccctcgcctgggtagccaggacacctgggcctcgtggccaggccagaagccgtccccamcctcccacccgtggaatccccgcagcacttcttcctggggtcttcgggggaagactgacttcctggctgcgtgacctggagctctgagcttcagttttctcacttgtagagtaacatacacagagttcaccctacagggtcgttagaaggctgaagtgagataattcatgtgctggtataaactttgtggaaatgtgaggtggggagaggaggtggggctgttttgaggaaggagataagttaytggagccgcaaaaacaggtttgcttgtgcccttctaacatcgccttcccttttctgttgctgaagttttccttgggcagcaagatcaatgtgaaggtgggaggaaacagcaaaggaaccctgaaggtgagggccagggaaggggtggggccaggcactggtggaggagagggtgtggagtgagaggcctgtgggcagaggcacatggtccggggaaggaggcagacacctcagggttggtgtcccgtgcttccgtcctgggtgtttttccccctgcttgctttcgcttgctctccccatctctgggtacctgttgtttcctttacccgcctcagtgctggtggctcygaatcccactcctcagmccaggsctcttccctgaaccatgggccccactcgtcccactcccacagcacctcagacgaggcatgtcccaaagcccttcttcattctgtgtctcttgtctggctggtgggagcccctcccagccaggagcccagccactactctagaggccgtgttagtggcccctctcccaagcctgtccttatgtccctagtgactcctcctctgctcccctgctgcctgtggcccttggtgctgcatcctagattctgtgctgagacggccttctccctacctggaacttctctctacctcctgtctcccctgtctgatccactgtccacacggsagtgacactgaccttccaaaagccccagccagatcagccttggggaaaagtcactccccgctgcccacggctcagatggctgggcctctgcccacccctccggccagacagctctccttgtctacacagatccccttgcctttcctgtccttccctgcttcttggcccacaggacaagctctttcttctccttcaagccttggccagaagcctttcctgagcttttcagtccagcctcttcccagcacagtctggagtgttggcctctgggggcaggcccctgcttctttacctctctgtctcgcctgacgcctgtggcgaatgtggtgccactcgtgtgtgtggactgtgcagtgacggggaggaaaaggggctgaaggcctcaaatccygtagcccagggagatgcccttaggtatggcaccagagaggtctgtggcctyacatgtcccacgtcctctccctgccccttgctgagccaggtccttcgtacctacaatgtcctggacatgaagaacacgacctgccaggacctacagatagaagtgacagtcaaaggccacgtcgagtacacgagtgagtgtgggggttgggaggccttggggccaggcaggggctggcgcagggagccgggtggccatcccagccctcctcacaatgcttccctgtgcagtggaascaaacgaggactatgaggactatgagtacgaygagcttccagccaaggatgacccagatgcccctctgcagcccgtgacacccctgcagctgtttgagggtcggaggaaccgccgcaggagggaggcgcccaaggtggtggaggagcaggagtccagggtgcactacaccgtgtgcatctggtgggcgccgggagctgccctgggccaggggagggagggcaggacccaggctggggctgggcttctggagcccgcgcaggcagaacctggacgacagctcacacgtytccacaggcggaacggcaaggtggggctgtctggcatggccatcgcggacgtcaccctcctgagtggattccacgccctgcgtgctgacctggagaaggtgtggtcagccacccagggcaaccccctctgtcccaggtactgagccctgtcatgtgcagggcctgtgaccaactccccttttccacagctgacctccctctctgaccgttacgtgagtcactttgagaccgaggggccccacgtcctgctgtattttgactcggtgagtggggagagatgaggcaggaagggactcgatggcaccgggtttactgagtatgcgttaggaggtttctcaggagacagctgtgtcagcggctggtgctcttgagaacttgtgatgtcatcagagagaaggacaagaatgtgagcccgtgagacacagcagagtaaggggcagacctgcaggcggcagggaccgatgccagtcagcagggaccctcagggtttgagagggagtctttcctaatgctggttttattcagcttgaggggctgcctttgtttttttgttgaacttcctatcttttttttaatattaaagcgtattttcctttacaaagtgatggtggccatagatgatagttgtatttgtcttttcacgaccttatttggctaaaatagttatcaaccctcttacggctctcaaaacatttttatttatttatttagtaaagacagggtctcgctctgttgcccaggctggtcttgaactcccggcctcaagcgatcctctggcctaggcctttcaaagtaccggatttacaggccagagccaccatgcccggccttcaaaaaaagttttggaacatttactgtaacctctgggagaaaatgtgagaaaggtgtggtggctgtcattagccagctgtttgtaggtcagggagacccctacccagtgtgtgcagaggggccagcccccatcagctggggaagcctggctgacacatctgggttgaacacaatagaaaacacagagccaacaagattcccggatagggagctgacggtgcagcagcctagctcaggagggacactggcacggcaccgtgtggactgggcccgcgtgggcacgaggaggggtcaggcctgggacctgagtcggggggtcaggcaggatgacagaacctgcagttaggttgtggcaaataaaggaggacccagtkgtatccatgacaaagatgaggccgcgaggagggcgagtgggtttgggggcaggcagagtgccttggagaacttacaggtcctgccacaatcctaatgcaaggatggagctgcaagttcagtttgggaatcatcagcctggattggtttggtggaagccagggagtggttgagacccccacaggggagctctgaggaaggaagttccgaaggagggaacgtaagaaatgaccaggtcagaaccaagggtggtccagaagctaacccttagcttagggacagtttcacagagaacacgtccatgatgcaagactctgctgaggscctggagcagtgaagactggggcaaggtcaccctctgggaagtgaagtcaccagagaccttgcggagcagctttgagagttctctgagtaggaaggtaacagaatgtgaaggacactggagagaaggccaataggaagcaaacaaaaacaggccaaggaaacccagtacagggggctgcagggcccagggagtgggtccctcatctctcctccccacgcttggccaggtcyccacctcccgggagtgcgtgggctttgaggctgtgcaggaagtgccggtggggctggtgcagccggccagcgcaaccctgtacgactactacaaccccggtgagcactgcaggacaccctgaaattcaggagaactttggcataggtgccctcctatgggacaatggacaccggggtagtgagggggcagagagccctggggctccctgggactgaggaggcagaatggaggggcctgtgccctaactcctctctgttctccagagcgcagatgttctgtgttttacggggcaccaagtaagagcagactcttggccaccttgtgttctgctgaagtctgccagtgtgctgagggtgagactgagggcctggggcggggcagtggaggcgggatggccggggccccccccacactgtctgatgggttccccaacttcagggaagtgccctcgccagcgtcgcgccctggagcggggtctgcaggacgaggatggctacaggatgaagtttgcctgctactacccccgtgtggagtacggtcagtcttcccaccgaggccctggcctgaccctccctcggggaccggcygttttggtctctctgggtgtagcctgctcctcttacaggtcatgcacgcagcctgtttgctctgacaccaacttcctaccctctcagcctcaaagtaactcacctttcccccttctyctcaccccctcttaggcttccaggttaaggttctccgagaagacagcagagctgctttccgcctctttgagaccaagatcacccaagtcctgcacttcagtatgaagcaaaccggagaggcgggcagggctggggggagacagggaggctgaggtgtggccgaggacctgaccatctggaagtgtgaaaatccccttgggctgtcagaagccttgggcttggccataaatagggaggcagtggcacctctccatgggggtggcgaaggtggaatgagaggatctacacagagtccccagcctgggctcaccctgcaccttctcttcccctctgaccacttttgcgcacrtcatccccgcagccaaggatgtcaaggccgctgctaatcagatgcgcaacttcctggttcgagcctcctgccgccttcgcttggaacctgggaaagaatatttgatcatgggtctrgatggggccacctatgacctcgagggacagtgagtcatctggtcccctcagtctcttgtcctccccatgcctygccacctaggccttgcccctcagaagccagatgcctgtgctctccgtttccacctgccatcctcccgagccctgytgactgyccctttgccccctgcagcccccagtacctgctggactcgaatagctggatcgaggagatgccctctgaacgcctgtgccggagcacccgccagcgggcagcctgtgcccagctcaaygacttcctccaggagtatggcactcaggggtgccaggtgtgagggctgccctcccmcctccrctgggaggaacctgaacctgggaaccatgaagctggaagcactgctgtgtccgctttcatgaacmcagcctgggaccagggcatattaaaggcttttggcagcaaagtgtcagtgttggcagygaagtgtcagtgtgtgttgctagggctgagagcagtgcccctgcccgatgcagttctgggcaggccaggttgacataaccttagactctctgagccctgatgacccttgggctgttcagctctgctagaacctcccagatgacccgctaggagtctagtgcttcacaggaccaccccgagcagaactgggacccaagagcctgcaccccaaggaccagagtccatgccaagaccacccttcagcttccaaggccctccactgcccggctgtcgccagtcaccacggcctcagacagggcttgtgctcagctgacacctgtgacacagctcttctgcctcatgagctgttgtccagctacacctccccgactctgtcctcgtgctgctggcggttctgaggtctgcagattttagctgagttccgggctgttgaaagcctgctgacgcttggttctgttatcagtggaatgaggtgactttcccggagttgtgcaatcctcaggtccggcagtgtcttcttccagttactggtttcaaacaagccaaaagtctgactttggtgtgtttgtgaatcctctgaggaagccgctgttctcctggggtctccccttcccaccggacctgcctaactttcccccatttagtggcacacctggggtcttcagagatgactccgcgtctgtccaaagaagtttggtgagatcagtttccgtagaggtcatgacagttcagcagcctgccatccagtcattcgacagaaattcgggaatctttcacttcatgccatgccctgtgccaggtgccagagatacagctgctcactccagggctcatcgctggggagacagataagaggacgggcagtccccaccctctgtgaaagatgtgatgtcagggagcagtgtggtcctgtggggcatctaaccaagtcaggggcattgccaggcagggacagggaaggcttcctggagcaggtggcctccaagtggggctctgaagactgagaaggagccaggcaaagagcaggggtagatgagggcatctggggcagaaggagaatatacaaaggcccagaggccgggggcaggacagggtacctttggggacattgcatgtaattgaccacattcggagtttggatttggaagtggtggaagagatggagatggtgagacaagtagtaagcacgtcagccttccaggtgcgctcctttccgatgagcactgtcttatcccacgtaactttgagaagtttgggcctttcccactgtggcagaggtttcctgaggctcttgcatacatggccctatggttgctcatcagatctttctcccagtagctgctcagcatggtggtggcataagcccattttccggagccagggattcagttgcagcaagacatggcccggtctgggaggtcaaccatgaagaaggcagtagctgtcattgcccaaccccagaaatcccaatcctgttttctccctctcagtcctgatcatggattcagcagcagcgaactcgccaatgtagtgggtggcacagccagggtcttgactctggctctgcagtagcacagtctggaaaagctctgaggggagagagacccccactggtccgagggtctggcacagagccagaaatgggggggaaggtatggggctgggtcgcctctgacctctcaggtaccatccaggaggccctggcctctcactgaacccggccactcctctttggcatggcctcttcccaaatccccaaactgcctccttacccacaaaagtggtctctgagtgtcagtccagtgggacccccaccccttatggcttcagttccccaaatagggctggacccttgatcctgatccagctgtggctatccagccccttcctggggactttggactttgaggggggcatgcccagttgtgctgggaatccatactttccctggctggagtagaacctgtggactgtagtcctgagggcagtcatgttctgcctgtgcctggaaacacaagaaacttgactgcagagagaagaaagaggagagaggaacagagcgaggaaaccgcccgtctccggggctttttctgttccctatccttgactttctaagaccagtggggtcccctcctctgcttctttttcctgagttctgtgaaattccccaattcttattttttatctcaaaccagctcaaggtgggctgttttcctttcaaccaaagaaaggtgctcctggtggctaaaggtacatattcgacagctagatttccaggctggaatcctgccctccacaacatgcgaacaatacccgtgttgcatatagagcatggctgtgaagagttgagtgagtgcccacaaagcacttagagcagtgtctggtacatgctattactccgcagcgggaaaccacttcctcctttgtcttctgggcacttttgtgagtgaaaggaggcactaataacaatcacactgggatacctgtatatactggaatgccccaggcaaaccaggcttaaactgtattactctatctgtagcttaaactaacaaacaaacccacacaaatcacattttgttcttcaggcgattcaggaaggcctattaggcagggactgccattttctctctgagacaaacatcatgccagtaaactggcccacggtggggtggcagagggagagggcccaggtcggggcggacacccttgcctgcacgggtgatgtggaaccagaaagctgactctggatgcaggaaaaaggtcagggttgcatttcccttccttgcttctcgatgggtgattaattttttttgaaatacggacgtcccaaggccaatgagactggtgtcattccagaaaagggccactctgtgggtgggtcggtgggaaggcacctgagggtggggtcaagggaggccccaaaacagtctacacagcaggagggatggctggggctcttgagctataagtggcacctcagggccctgacgggcgtcttgccatgctgctcctgggcctgctgctgctgctgcccctgctggctggcgcccgcctgctgtggaactggtggaagctccggagcctccacctcccgcctcttgccccgggcttcttgcacctgctgcagcccgacctccccatctatctgcttggcctgactcagaaattcgggcccatctacaggctccaccttgggctgcaaggtgagaggctgatctcgctctggccctcaccataggagggggcggaggtgacggagagggtcctctctccgctgacgctgctttggctgtctcccagatgtggtggtgctgaactccaagaggaccattgaggaagccatggtcaaaaagtgggcagactttgctggcagacctgagccacttacctgtaagggctgggggcattttttctttcttaaaaaaatttttttttaagagatgggttcttgctatgctgcccaggctggtcttaaattcctagtctcaaatgatcctcccacctcagcctcaagtgtgagccacctttggggcatccccaatccaggtccctggaagctcttgggggggcatatctggtggggagaaagcaggggttggggaggccgaagaaggtcaggccctcagctgccttcatcagttcccaccctccagcccccaactcctcctgcagacaagctggtgtctaggaactacccggacctgtccttgggagactactccctgctctggaaagcccacaagaagctcacccgctcagccctgctgctgggcatccgtgactccatggagccagtggtggagcagctgacccaggagttctgtgaggtaaggctgggctcctgaggccacctcgggtcagcctcgcctctcacagtagcccccgccctgcccgctgcacagcggcctgctgaactcacactgtttctccacagcgcatgagagcccagcccggcacccctgtggccattgaggaggaattctctctcctcacctgcagcatcatctgttacctcaccttcggagacaagatcaaggtgcctcacagcccctcaggcccacccccagcccctccctgagcctctccttgtcctgaactgaaagtactccctccttttctggcaggacgacaacttaatgcctgcctattacaaatgtatccaggaggtgttaaaaacctggagccactggtccatccaaattgtggacgtgattccctttctcagggtgaggacctggagcctagacacccctgggttgtaggggagaggctggggtggagggagaggctccttcccacagctgcattctcatgcttcctgccgcagttcttccccaatccaggtctccggaggctgaagcaggccatagagaagagggatcacatcgtggagatgcagctgaggcagcacaaggtggggactgtgtgtggacggcctcccctcggcccacagccagtgatgctaccggcctcagcattgctatgaggcgggttcttttgcataccccagttatgggcctgttgccactctgtactcctctccccaggccagccgctcagcccgctcctttcaccctctgcaggagagcctcgtggcaggccagtggagggacatgatggactacatgctccaaggggtggcgcagccgagcatggaagagggctctggacagctcctggaagggcacgtgcacatggctgcagtggacctcctgatcggtggcactgagaccacagcaaacaccctctcctgggccgtggtttttttgcttcaccaccctgaggtgcgtcctggggacaagcaaaaggctccttcccagcaacctggccagggcggtgggcaccctcactcagctctgagcactgtgcggctggggctgtgcttgcctcaccggcactcaggctcactgggttgctgagggagcggctggaggctgggcagctgtgggctgctggggcaggactccacccgatcattccccagattcagcagcgactgcaggaggagctagaccacgaactgggccctggtgcctccagctcccgggtcccctacaaggaccgtgcacggctgcccttgctcaatgccaccatcgccgaggtgctgcgcctgcggcccgttgtgcccttagccttgccccaccgcaccacacggcccagcaggtgactcccgagggttggggatgagtgaggaaagcccgagcccagggaggtcctggccagcctctaactccagcccccttcagcatctccggctacgacatccctgagggcacagtcatcattccgaacctccaaggcgcccacctggatgagacggtctgggagaggccacatgagttctggcctggtatgtggggggccgggggcctgccgtgaaaatgtggtggaggctggtccccgctgccgctgaacgcctccccacccacctgtccacccgcccgcagatcgcttcctggagccaggcaagaactccagagctctggccttcggctgcggtgcccgcgtgtgcctgggcgagccgctggcgcgcctggagctcttcgtggtgctgacccgactgctgcaggccttcacgctgctgccctccggggacgccctgccctccctgcagcccctgccccactgcagtgtcatcctcaagatgcagcctttccaagtgcggctgcagccccgggggatgggggcccacagcccgggccagagccagtgatggggcaggaccgatgccagccgggtacctcagtttctcctttattgctcccgtacgaacccctcccctcccccctgtaaacacagtgctgcgagatcgctggcagagaaggcttcctccagcggctgggtggtgaaggaccctggctcttctctcggggcgacccctcagtgctcggcagtcatactggggtgcgagagaggtgggcagcagctcagcctccccccgctggggagcgaaagtttcttggtctcagcttcatttccgtgaagggcaccgagaactcga

SEQ ID NO: 97062 - DNA, 33637 bp, Homo sapiens
ggggcagtgtttctcagcccagttcagcccgctgagggtctttagggtgaggttgcggtaggagtcctggaaggcggcctgcaagatatccccctgggctgctgactccgaggccaggtcactcccctgggaaccccacacggggtgctgtgcgttcggctctcccagcaagaatagcgtctgtaccctgagcccccgggcctcgcgcagcccgccccacgaagcccgaatggcgtttctctggttcaggttctccggagccgtgcacaccaggatgagcaggaagggaggggccccgggaccactgcaagcttcctggttggggatcaagaggcggggcagggccaggggcggccccggtgaggcgggggctgggagcagggaggctagtgagaggctcagcagctcctcccccaaccccgaaggcccgaagagggtccagacgatcaccagcagcaaagcggcgagaaggaggcgccggaagagcctgagctgcatggtgcggcgtactccgaggggatccgtaagagcgaagggcggagactagctccccgggcctgggtcacggccggggacttaaccgaccacgcccgggatgcggaggtctgagcgcgcgaccgggaccagcgcaccctggggggcggggagaggcggtgcagctgcggaccgcggtcgaggcatgctgcgggggtggctaccttgtcgccgcggcctcgccgccagcaagctccgctccatggctggccgactgcggcactcacggcccctcccccgcctcgccccggcggccggtctgccgcccgcttccgcgttgcgcgctcccatccccgccggaagcggcgtcggagcagcgcggcagggcgcggaaacccgggcgggtggagtggcaccaaacggagtgagaccggtctgtccagccgctccccatcccaacccaccgacgtactccaccagggagaccacacccttcataaccaacgtccgcgtttttgcctttgttgcttcggtcacagcccgaaggattttcccttatgactagatgaccccttaaaagaaaacaaaaacaaaaacaaaaaaacccagagtgaccaagacctgcaaactcaccttaactgcaactggctaggctcagctaacccactccacaatgatgctgcacaccaaccccagggtgttggtctctaaactggtctgggtcagcccctcaaggctgaactgttttaccctcacatttctctttacagagagggacatcactagctacatatagggagactggggggtctgcagcatcaccactgctaaaactaatagcactgtgtgggcaactgagtagggcagctctaaatggaaaaaggacccagcactttaacattccctattagaatggacagaaaggacaggaagccataggtatataaactatttattaacagacaaggcctacagacttatttcttcttggacacacccacggtgcggccacggcggccagtggtcttggtgtgctggcctcggacacgaaggctgcaggtaaaaagagaagagtcacaggtcatgcacagcagaaacaaaaggttggggaaaaagaagagcgagtaggaggaatgctgagtcgaggtaggcagggagatgagaccccccactcacccccagaagtgacgcagccctctatgggcccgaatcttcttcagtcgctccaggtcttcacggagcttgttgtccagaccattggctaggacctggattcagaggagggggcaagggatgttttatcccctgacctcctatgcccaattctgttaggaccctccacccttcctctaatcctgccctcatttcagtacacacctggctgtattttccatcctttacatccttctgtctgttcaagaaccagtctgggatcttgtactggcgtggattctgcataatggtgatcacacgttccacctggcaggcagaccaaggtcagatctagatggacccctttctgaggctgaccccacccccagcccccttccttgtcctcacctcatcctcagtgagttctcccgccctcttggtgaggtcaatgtctgctttcctcaacaccacatgagcatatcttcggcccacaccctgaatgaagtgaggggtttcggaattagtgttgaatctgatttttaaattcctttatagcctcattcaaaaagctcacaaaggtaggatctgcaataatctattttgcaatcccctaggtcaccctttcctcacccacctttccagatataaaccgttcgacagaaggttaactttgggccggtcgcagtggctcacgcctgtaatcccagcactttgggaggcccaagtgggcagatgacattgagggcaggagttcaaaaccagcctggccaacatggtgaaaccctgtctctactaaaaatacaagaaaagttgctgagcatggtggcaggtgcctgtaatcccagctacttgggaggctgcagcagaatagcttgaacctaggaggtggaggttgcagcaagccaagatcacgcaaccacactctaacctgggcgacagtgagaccccgtctcaaaaaaagaaaaaagtaactttgttcaggggtatgactgaatcatgaacacagaatttagtattacagacaaccctttgaaagcaggcagtatcttttttttcccccattgctcagcatatgtagttgtcactaagtgccttctgattcttgcatttaggagaacaaggggcctgccactccaagctgatgcagtaaaccagggtcttatgagttacaggctttgattaaggtattgggctgtcagttcctcagaatctctaagggtcacaattatttaggcaaatcactgtatccccataatcaaagtattccaagatcacaaactcaattttgtcagtgcccagaactgactgcccaagttattataaaaagaaactaatgcttacattggtagcatcacatcaacaccagcactagcacccatgccatctgaactcatgaaccaaagtgatttggagagtgaaggaggaactgaatactgagccctgcccctcattttgtccaactagaacatcagaatgtggccctatttggaaataaggtcgttacggaaataattaggtaaaatgacgttatatttgattagggtgggctctagatccaatgacaaatcatgagagagacacgaagaggaccatgagatgacagcaacagattggagtaatgcagctacaagccaaggaacactaaggattactgacaaccaccagaagacaggaagaggcaaggtaggattcttaagtgcctccagcgccaagagtaattttctgcttagtttatatgaacttgttacagtaggctccaggaaactaaaacaaatggcagttcctatctgcaagaaagagatcaagggttggcttcaccgtggctcatgcctatatgcctgtaatcccagcactttaggaggctgaggctggaggatcactgagcccaggagttcaagaccagcctggacaacacagcaagatccagattagccagatgtggtggtgcacacctgtagccccaactacttggaaagttgaggtaggaggattgacttgagccctggaggtcgaggctgcagtgaagagtgattccgccactccagcctgggcgacagtctcaaaaaataaatgtggctgggtgcagtggctcacgcctataatcccagcactttgggaggctgaggtgggtggatcacctgaggtcagaagtttaagaccagtttgaccaacatggtgaaaccccatctcttctaaaaatacaaaaattagctgggcgtgtgcctgtaatctcagctacttgggaggctgaggttgcagtgagataagattgcaccattgcactccggcctgggtgacggggtgagactctgtctcgggataaataaataaacatgaccaagggtcaaattattaggttgattcagaagagagcagggtctttcaaattttttattaattaaatgacgaggtttcaccatgttgaccaggctggtctcgaactcctgacctcaggggatccgcccacttcagcctccgagtgagccactgcactaagcctcaaatttaattatatgtttacaagtgaaaagatttacttcaaaatgggtgtgggaagagatatagatgaaataagatttctaatttttagttagatacatccatgaaggttattctctattacacttatgaatgctgcacctctacttaagcctcacagccggtctctgaaataagtacagtatttcacactgccttattagtttcacagagcacccaacagaaggaatttccctctacaaattcctcaacagagccaacagtatccctactactatccattccctaacgtcgcctaagtacctaccatgcaacagaagccaagaagacaggcctagccctgcacgcatggacacatactggtaggctatttccacaactaactacacattctgacttaagggaaaaaaaaagaacgttatgtatctagaaagccaagaattcattaggtttgtggagagaaatactcaagtgaaataatattcttgcattcattgattcgattcttaaaagccaaagaaagatggatgtactccttcacacttcgacaggaaaggagtgtcaattatggctcatctgagtaaatgtcccactcagacttcttccaccctccatctacaggcttcttcacactttttatctgttggtatttctacttatccctcaagatgcccaataatcctccaattctcagggaatataaatttcgcaggaagggttgctgttatgatggtgggatgggtaaagaaaccgaatctagaagaaatctcacaagctcgtggttcaggaaaatcttagcgaattcgggtgagcaaccatacctcctccccacttccccaggtgaaatgttttggcttgaccttagaccactatcttggctttaatcacttattttctgtggtaaatgctaaaggggtcagtctctccctaaaccactttcttttcttaatccagcagtcaaggtgatctggatgagactcaagtctccccagccttgcttcatttttgcttatgtcttcacaacccaattctcatttacattccctattccttaccctacttcacttaccttaatggcagtgatggcaaaggctattttccgccgcccatcgatgttggtgttgagtactcgcaaaatatgctggaacttttcagggatcactagagactagttgaaaaagtacgggggaagaaatcagacacagtaaactatcaaacagtaaggccgataaggcaaacgaacttcatacaaaaaggttaagcctgtcacacaagtggcaagacacccgccccccattccttaggttttcacaccacagagcaaactcctcagtcctgcagagtaggcacatgaagcgttcaagcttgggaaaatgcaacctctggagagaggaagcaggtctcctgcccattcccaaaagtgcgtggcaaaagccagagttccccatatacgcccaagccttagacagctttcgtgcgcccgagcagtgacccttcctcgggcccgctctccggaattggaaatctttggtgtccctttccagggacgcgatccaaggctccatacagaaagtcgcaggccctcagggcaggacgtttccagaaccctgacagccggctttccttgcccgagctgcgatgccgctggatcacggcacggattccagtcttaccatggctgcagcacaagcggcggcgtgtaggcctcctgtggaagagagagcggaagtgacgcgatatcattatatagcttccaggaggaagaggcggtgcgatctaggagaagtgcttccggaaactgtttcagcgcgacctggctggatttatgagagtatggcttgggtaccacaacttccggtgcgcctttctttacagttcgtaaggttcataggtaagagaacagcgaaggttccggggctagtttgtgtttcagacttccatatttccatttgcagttgggtgaagtggttagagctgaaaggggacagctggagtcaaacaacttaactcaaatatctgggaacgatttcgcgctgaggaagaccctttgggacttgtagctccactccggggaacggactcgccgggactgayagttgccggaagtgaggctgcggggaatggccgccgctgcgaccatggcggctgcsgcccgggaactggtgttgcgggctgggacctcagatatggaggaggaagagggcccgctggtgagagcgcggagctgtttctcctccgtagttccggtgctcctagcttcagaaagacctgagctgggtttaggcacaagggtgggaacttggctgctacccgtgatattacctgtttggctccccgtacccttccctgtgatcagacccgaccctgagcgggaccctagtggctgaaactcatgttctggggcacaaaatttcaacttcactccacattttggggtagagtcacgaagtagtatagtgtaaaggttaagaacatggcctctgaagccagactgcctgagttctatctctgccacttacacgctgtgtgcccttgggcaagttaaccagcttctctgtgccatcatttctcacacctttaaggtgaggaagatagaacctattgtatacawcgtcgttaggattagatgaatatgtgtaagattgcacctggcatgcaggtaaacactatgtgttttgacatttctagaaagcctggggttccccagaggtgtgatagaacacccaagatggcaggagtctgagggtcytaaatttaagtgcaagttctgctctatcctctgcaattcctagctttcctcattcggtcatctccactgcacttttttttttgagacggagtcttgctctgtcgcccaggctggagtgcagtggcgcgatcttggctcactgcaagctccaccttccgggttcacgccattctcctgcctcaacctcccaagtagctgggactacaggcgcccgccaccgcgcccggctaattttttgtattttttagtagagacggggtttcactgtgttagccaggatggtctcgatctcctgacctcgtgatcttcccacctcggcctcccaaagtgctgggattacaggcgtgagccactgcgtccggcctccactgcactgtcttgtcttttacctttttttgttttcttkagacgggtttccctgtgttacccaggttgaccttgaactcctgatctcctcaaacaatcttcccgtctcagcttctaagtagttgggactacaaggagcccaccaccatgctgggctacctccactgtctcactggatcgtctcactccttgtcgtattccttacccatcagcacaaaataggagagtgggtacaacgtgagactcttagaatttttcaaagcagtacctgtggctcccagtaaaagcagctccttctcacttgaaggactggggatatccarttatattttttctttctgtctttcaccgtaccctactcccattaacttatccctttccaggcrggtggtcctgggctccaggaaccactgcaacttggggagttggatatcacttctgatgaattcatcctggatgaagtggatggtaagcgatggcatggggtgggtgcagtacctgtaatctgagaggcatgggggctggaaggaataaggtagggattggtgtgcagatactcaatgtggggagagggagctgtggagctggacccttatgataaacttctatttccagttcacattcaggcaaatctggaggatgagttagtaaaggaagctcttaaaacggtgaggctttcccctgtactaatctgcccttctatctattctaccccaaaaggaaaaacaacagtctcttgcttttgttgtatcagcctggtatctgaccctttagtccttcactgattctgttacagtgtccctttactgagacttccttctgacctgtcatctttatgttctcccagggtgtagatctccgtcactattcaaagcaagttgagctggagctacagcagattgaacagaaatccattcgggattgtatcctccagcagagggaaggggtggtgctattgacatggggattttgtggcgtgtggtacagatgtcccagctggggtcaacatctstgaggtttctatcacttcaaagagaaattggagaggtactacaaatctgaggatctcccatcttcaccatgaggccccttgactttttgtggatcagatattcaagagagtgagaatatagcatctctacacaaccagatcacagcytgtgatgctgtcctggaggttagtaatcatsacctgtgacccctaatagctactctgaaccagatcatggactctggtgccatttttaggtcatcagcctcaagatggggacaggttagggtcattttcaagatgacttcaggagccttttttgttattactgccatatttaatgttatttcctgataatctggggtgtctcatcatctgccaccctcaaggactgataaatactgaagacttcacaaagagtctttggtggcccacttatcccctacaaaccctatagcactccggcaacatctaccctccctacagcgaatggagcagatgttgggagcttttcagagtgacctcagctccatcagctctgagatccggacactgcaggaacagtcaggagccatgaacattcgacttcgaaatcgccaggcagttcgggggaaacttggggagcttgttgatggtctggtggtgccttctgctctggtcacgtgagttaccagtttgaagggttataatgtccatagcaggtggatgggctggggtgacccaccctatttaccatatgggtctcctggctccaggttaagtgctttttagaaattagtagccaggttaaccaccatttctttaggtatgcattaggcatcaaagattaagattaagaatgatgtaagatcaggtgtatagtggggaggtccaggaatagaaaactttgtacatgtgtcctgactatatggtacaatgcaaggtggtagagatgacaggggctggaggtaaggagygtggtctgggtctggtttagggatgtctgggtctcccttgtaactcatcccacccctccctgctaaccagggcaattctggaggctccagtgacagagcccaggttcttggagcagctacaggagctggatgccaaggcagccgcagtcagagagcaggaagctagaggcacagcagcctgcgcagatgtcagaggcgtgctcgatcggctccgggtcaaggtgggaagtagggatggataccctggaggctactggaagcagccttcccaagatcttcactatggatttccttggcagagctcactgtagcctgtctccarggacttcaccctgccttttctgggcagccccattcttgtctctctgggtttccctgaaaatcttgagaaataccaaagagatattcaccacccttctgcctatgtttaccatttgttgcttcccccagttcctctcatacagcaaaagggttgcagcttcatgccctgtgtttggttccccacatctaggcagtgacgaagatccgagagtttatcctccagaagatttattccttcaggaaacccatgaccaactatcagatcccccagacggccctgctgaagtacaggtcacaaccccaaggaagtgcatgggatggcctttgagtttttgagcggcctagtgtgggcatctggtttcttgggagacaggtagactgacatgttcctgaccccctaggttcttctatcagtttctgytgggcaatgaacgagcaacagcaaaggagatcagggatgaatatgtggagacgctgagcaagatttacctgtcttactaccgctcttacctggggcggctcatgaaggtgcaggtaaggtcaggagggagaggtattcctgggcacatggactgggaggaggggacatccytgggcaaggaatattttattgtgttgtgggaagagacggttatcagttctcttttctctttccttagtatgaggaagtcgctgagaaagatgatctaatgggtgtggaagatacagcaaagaaagatatcctagtactggggaaccctcatgccaggccttgagagtgggaggactttcgactccagccaccaatgcactgctccttaccttttcctatgggactgaaaccttttagaatgtgatgaaagctatagcctccctccccagaaagatgcacacattrttttgacacatagttttgcatatgattgcaagggagggagagacaccctgaagcccattcacagatgtcagcacgtggggccctagtactgggaaagagggctggctaggccacgtctgcctgtctggggtccccacagatagtgagtctttgggcccagttatggtctcattgttttccytgactctgacccatcttacgattcttctcaaagccatcgctccgcagcaggaacaccattttcaccctaggaacccgcggctctgtcatctcccccactgaacttgaggcccccatcctggtgcctcacacagcgcagcgcggagagcagagggtatgaggaggaacaagcttcagtcacgaaagaggctctgagcacggtggggagggaaggccagacctcagggcagagcttcccaacctgcaggccctgtcttaatccccttagacttgggagtggccttctccaatcactccagcctgctgtgatgtgaaaagagctgggaaccattgacttaagggcatgcagaggggagagactggatgaggggaatgacagtcagaggcaggtgttgaggtggatgcaggagtagcaacagcaggtgggtgtaggccctttttgtacccctatgttcccccaccttttcagtgcccattcagcttgctcttagacagcccggacctagatagatgcgaagggtctgcctagctcttattactcaggtttactgattttccagccatatccatgggaagtcagtgttggggtccatcccttctgtttttcttctttactcctcctctcccagtatccatttgaggccctcttccgcagccagcactaygccctcctagacaattcctgccgcgaataccttttcatctgtgaattttttgttgtgtctggcccagctgcacacgacctgttccatgctgtcatgggccgtacactcagcatgaccctggtaagactcctgtttcctgtaccrttcaacacctttgtccccagtcttcatcagcagcatagtggggtcatgactctggtagaactgaaatcaggatcgcctcattctaaaatgtctaagccttggctgggcgtggtagtgcacacccataatcccagcactttgggagtccaaggcagtaggattgcctgagctcaggagtttgagaccagcctgggcaacaacctcatctctacaaaaaatgaaaaattagccgggtgtgtgttgatgtgtgcctgtggtcacagctactaaagatgctgaggtggaaggattgcttgagcccaggaggtcaaggctgcagtgagccatgcactccagagtgagacctgtctcaaaaaaaaaaaaaaaaaaaaatagccaggtgcagtggcttacgcctgtaatcccagcactttgggaggctgaggcgggaggatcacaaggtcaggagtttgagaccagcctgaccaacatgatgaaaccctgtctctactaacagtacaaaaattagccaggtgtgcgcggcctgtaatcccagctactcgggaggctgaggcaggaggattgcttgaacctgggaggaggagattgcagtgagccaagattgcgccattgcactccagcctgggtgacagagcgagactccatctcaaaaaaaaaacttgttacttagacttgtcacagtgttactcccccatgaaatcctcagtgcgtagggtccctgagactacccctactgctgacccacaatcaggcaatagcacgtgaaaactgagggtcccccaaatcttggtgctcaaacccctgacccaagctcagccctgaactctgctgtgataggcttgtgatcatagatcctggtgtggccaggtgcagtggcttatgcctgcaatcccagtactttgggagaccaaggcaggaagrttgcttgaggccaggagttcgagaccagcctgggcaatgcggcaagaccttgtctctacaaaaaatttaaaaataaacttaaccaggcatggtggtacacacccatggtcccagttgcttggcaggctgaggtgggaacatcacttgagcccagatgtttgaggctgcagtgaactatgattgtaccattacaatccagcctaggtgacaaaacaacctgtctctaaagccgaaaacaccgggtgcagtggctcacacctgtaatcccagcactttaggaggctgaggtgggcggatcgcctgaggtcaggagttcgagaccagcttgaccaacatgatgaaaccccatctctactaaaatacaaaaattagtcgggcgtggtggcaggcgcctataattccagctactcaggaggctgaggcaggagaattgcttgaacctgggaggcaggcggaggttgcagtgagccgagattgtgccactgcattccagcttgggtggcaagagtgaaactctatctcaaaaaacaaaaaaaaagccaaaaacatagatcctggacaggaaagcagggggcagttccattttacgtctctcccttctgtcctgtccagtgcatcatccccaaagaaacaaatgcgtttgttcatagtcactgaggacaacaaactgacattctcttttaatcctctgtttgttccccwatcacacagaaacacctggattcttatctagctgactgctacgatgccattgctgtttttctctgtatccacattgttctccggttccgtaacattgcagcaaagagggatgttcctgccctggacaggtcactgaattctggtccttgatgcccaacaggccamraactctcttggtcttgcatgactctgccctgaccttagactcctactgacctggtatcatcaacctttattcccattcatttgctccggargcagtagtgctgctttttgactcacctttctccaaccactgccccscaacccccacaactagctattgaccattaaactgaatgatgccccactccctcccatccccctccaacattccttgctggctgacctctgattctgattaagcccacaggtactgggaacaggtgcttgccttgctatggccacggtttgaactgatcctggagatgaatgttcagagcgtccgaagcactgacccccagcgcctaggggggttggatactcggccccactatgtgagggagggcaagggtaacaaagggttcttgaaaggcagggctctaagcatcattgtgggggttggccaaggtcacagttgtgtcatgggccaygctatgagcaggtgttctgggagggtggtraaactcatggtgagtggtgcactgtgggtaggagggactgaaggtagagtcacatcacatggaggtgggttggctaaggaagttgggaggttgtgttggttgggccaggaggtgggtgtgattttccttcccactctctcctagatcacacgccgctatgcagagttctcctccgctcttgtcagtatcaaccagacaattcctaatgaacggaccatgcaattgctgggacagctgcaggtgagggtcggacaggagacacttcccagcagcagggctgcttccagtgggtggagtctgaggaggagccagatggggcccagatgaccttgctttctggtgtcacctcttcctctctgccttttcaggtggaggtggagaattttgtcctccgagtggcagctgagttctcctcaaggaaggagcagcttgtgtttctgatcaacaactatsacatgatgctgggtgtgctgatggtaataggtgctccttctccttgccttcctacccagaaaattcggtttcccccactgctgttagctctgtgagggcagagatgatgcctgtcttgttcagtgttttactcttggagtctggcacagtgtcyagcttagtacaataagtgtggaatgaaggggacatcctgaagtgaaggactgctttccccaaactagacatttccctttgtcttcccttaggagcgggctgcagatgacagcaaagaggttgagagcttccagcagctgctcaatgctcggacacaggtaggggtgtggggaaaagggaagagacagccttctgtgctgttttcagctctctctctctctctctststgtgtgtgtgtgtgtgtgtgtgtgtgtgtagggagtggcataatggatctcaggtatgcggaattactgtaactcttgattcacaacatactgtcattattggtctattttattttattttgtctttggtttttttttttttttttttttgaggcaaagtgtcactctgtcacccaggctggagtgcagtggcatgaacatggctcactgcagcctcaacagcctgggcttaagtgatccttctaccttagccccctgggtagctgggaccacaggtgcgagccaccatgcctagctaattttttatttttagaatgaattttatttttttctttatctatcctctcaagcatttatcctttgtgttataaacaatccgattacactaagttattttaaaatgtacaattaagttataattgactatagtcaccctgttgtgctgtcaaatagtaggtcttatttattcttcctatttttgtttgtacccattaatcatccccaccttctccccagccttccactagccttcccagcctctggtagccatccttctactctcttcgtacatgagtacatgagttcaattgttttgatttttagattccacgaatcagtgagaacacatgacgtttgtctttctgtgcctggcttatttcacttaatataataatttccaattctatgcatgttgttgcaaatgactgagtctcattcttttttatggctgagtagtactccattgtgtatatatcccacattttctttacccattcatctgttgatggacacttaggttgcttccaaatcttagctattgtgaacaatactgcaacaaacatgggagtgcaaatatctcttcaatgtactgatttcctttcttttgggtatatacccagcagtgggattgctgaatcatatggtagctctacttttagttttttgagcaaccttcaaactgttctccaaagtgtttgtactaatctacattcccaccaacagtgtataagggttcccttttctccacatccttgccagcattgctattgcctgtcttttggataaaagccattctgactggagtgagatgagatctcattgtagttttgatttgtatttctctgataatagtgatggtgagccccttttcatatatgtctgtttgccatttgtattcttttgaaaaatatctattcaaatcttttgcccattttttaataggattattagactgtcatgtagagttgtttgagccccttatatattctggttattaatcccttggcagatgggatgtgcaaatattctttgtctcttcactttattgtttctttagctgtgcagaagctttttttttttttttttttttttttgagatggagttttgttcttgttgtccaggctggagtgcgatggtgcgatctcagctcaccgcaacctccgcctcccaggttcaagcaattttcctgcctcagcctcctgagtagctgtgattacaggcatgtgccaccatgcctggctaattttgtatttttagtagagatggggtttcaccatgttggtcaggctggtctcaaactcctgacctcaggtgatctgcccagctctgtctcccaaagtgctgggattacaggcgtgagccaccgtgcccagctgtgcagaagctttgtaacttgacgtgatcccatttggccatttttgctttggttgcctgtgcttgtggggtatggctcaagaaatttttgcccagacccgtgtcttggagattttccccagtgttttcttgtagtagtttcataatttggtcttagatttaagtctttaatccatttgatttggttttcatatgtggcgagagataggggtatagtttcattcttctgtgtaatggatagccagttttcccagcaccattattgaagagactatctctctttttttttttttcagacggagtcttgctctgtcacctaggctggagtgcagtggtgcagtattggctcactgcaacctctgcctccttggttcaagtgattctcctgcctcagcctcctgaatagttgggattactgatgcctgccaccacgccgggctagtttttgtgtttttagtagagacgggatttcaccatgttagccaggcttgtcttgaactcctgacttcaagtgatcctcccacctkggcctcccaagtgctgggattacaggcgtgagctaccgtgcctgaccaagagactatcttttccccagtgtatgttcttggcacttttaccaaaaatgagtttactgtaggtgtgtgccagctaattttttaattttgtaaagacagttgtctttacaaaagacaactgttgcctgggctggtcttgaattactgccctcaagtgaaaaatcttatgattcttttttttttttaaagacggagtctcactctgactcccacactggagtgcagcgatacgatgtcagctcactgcaacgtccgcctcccaggttaagtgattctcctgcctcagcctctgagtagctgggactgcaggcacgtgccaccatgtccagctaatttttgtatttttagtagagatggggtttcaccatgttggcccagctggtcttaaaactcctgacctcaggtgattcacccgcctcagcctcccaaagtgctgggattataggcatgagtcactgcacccggcctagattctgtttttaatgacactggaaaacaacgaatttttgttttggcatatatatagctttacttttaaaagcaagaacacacacaaaaaaagggggaaaaaagcaagaacacaataaatgcaacatttagatcaacgagtacctgtgcacgagaagcacagggatggtttcagtaggatttcatagtttgatggtgacttttgccaagctgctgctacttggattgtgtggtgtgtttgtgagtgtttatatcattaaaaaacaaaacagccactgcactgggttgttttattttttaatgatataaacactgatgagacaaggcaagaaaacagcaaggcaaaaaagaaaaaaaaaaaagccaggcatggtggtatgcacctgtagttctagctatttgggagacaaaggcgagaggaccactttgaaatccaggagttcgagattacagcgagccatgatcatgacattgtagtctacccttggcaacacagcaagaccctgtctcaaacagcaaaacaaaacaaaaaaccccagaatcacaggatttttttcatgcataatttttctaatattgtcatgttattgcatatggctatagctcattccttttcactgccatatatgacttgtgtgattaaacatattctataaatggattgtttccagtttcttgcttctgtgagcattgttttatgaataatcatgtcttttagcacacatagatattgattatcttcatcaaaagtttctcttgggtataaacctaggacagtagtcttgctgctaataagatatgcagtattagtctttatgagacaatgataaattgttttcctaagtagttccttctcaccagcaatatgtaagaattcctactgagccacattttctccaacatgtggtattatcaggtctttgccattttttttctttttttttttagagaccaaggatgctgctaaagatgctcgggatcagaaatgtttcagattttgatttttttcggattttggattccttgcattatttttactggttagcatctgtagtctgaaaatctgaaatctgaaatgctccaaagagcattacctttgagcatcatgttgatactcaaaaacttccggattttggagcattttggatttcagattattggattagggatactcaacctgtatttcagtgggttttatttgtaattttctgattactaataacattgagcatcatttcaaatgtttagtaactatatgtaggggttcagtcaggctggtgggaaaaatattagtgatgatagccacaaaccctcttggaaggcctaagagtttgcataacttcagtaatagatatggttgaaggcgacctgatctttacctttagttaaataaattagagtaataacaaaggaatgtggggaagttatctaggtagcttgtttactcatatggtcttaagactaatctttgatgtaccgcaggtgcttaactgctttctactcaggaagtccacaatgtcagttaccccgtagtggtgttgactcaagtctttgtcaattaatctttactgaataaatgcgagtctcactagctggtcagggccgccattgcaactgtttacagtactcttcagggagtctgtaaacagcctggacacactcagctggactggcaaagcagagtatctgtgtgtcagtgtacctcattcatccgttgccgggtcaggggtctgcaagggacagactccctgaagctggtgctctgtgtgaggagcgtcaccacaactatacaatttttttttttcctgtaaaatggctgtcatagcatttgaccttttaaaaatcggcttgtggctgggcagggtgtacacctgtaatcccagcactttgggaggctgaggcggatggatcagttgaggccagtaattcaagaccagcctggccagcatggcagaaccctgtctctactagaagtacaaaaattaaccaggcatagtggcgcatgcctgtagtcccagctcctcaggggcgctgaacctgggaggcggaggttgcagtgagccaagattatgccactgcactccagcctcagttacagagcgtgactctctcaaaaaataaagaaaaaaataagtctgctagtattttttatttataagagttctttgcatcatctacatactaatcttgttgattatacgtaggttacagattatcttttagtatgtatctttttrcttttttttttttttttggtgagatgagggtctttctgtgttgcccaggctcctgggctcaagaaatccttgcacctttttttttttttttttgagatggagtttcactcatgttgccgaggctggagtgcaatggtgtgatctcagctcactgcacctctgcctcccgggttcaagcacttatcctttctcagcctcctgagtagctgggattacaggcgtgtgctaccacgcccggctaatttttgtatatttagtagagatgggttttgccatgttggccaggccagtcttgaacgcctgacctcaggtgatccatccgcctcagcctcccaaaatgctgggattacaggcatgagccaccgcgtccagcctttgtttttttaatgttgctttttgattaaagaaatttgtaattttaatatgattgaatttatctgtccttcatttttatgtctttgtttttagtaacagtcttgctctgtcacccaagctggaatgcagtagtgtgatcatggctcactgtagcctcaacctcctgggctcaggcaaccctcctccctcagcctcccaagtaactaggactacaggtgtgtgccatatgcccagctaatttttgttgttgttgttgttttgtagagacagagtctcactatgttgcccaggctggtctcaaactcctggcctcaagtgatcctcccgcatcagcctcccaaagtgctgggcttacagccaccatctaccacgcctgactatttttgtcctgtttaagaaattcctgggctgggtgtggtggctcacgcctgtaatcccagtactttgggaggctgaggcgggtggattacgaggtcacgggatcgagaccatcctggccaacatggtgaaacctcgtctctactaaaaatacaaaaaaattagctgggcgtggtgatgcgtacctgtagtcctagctactcatgaggctgaggcaggagaatcacttgaaccagggaggtggaggatgcagtgagccaagatcgtgccactgcactccagactggtgatagagtgagactccgtttaaaaaaaaaaaaaatgaaattccttattactccaaggccagaaaaatattatgctacattttcttcttaatattgtagaattttggccaggtgcagtggctaaagcctgtaatcccagcactttgggaggccaaggcaggaagattgcttgaagccaggagtttgagaccagcctaggcagtatagtgagacctcatctctacaaaaaattaaaaaaatatattagccaagcatagtggcacacacctgtagtctctgctactcaggtagctgaggtgggaggatcacttgagcctgggaggtcgaggctgcagtgagccctgtttgtgctgctgcactccagcctgggcaacagagtgagaccctgtctcaaaaaataataataaaattaaagaataaacaaatatatagagagaatttttttgttacctttaagtctcaaatttacttggaattaatttttgtgtgtgatgtgaggtagggatctatttcttttttttatgtggatggttggcccagaaccatttatagaaaatctttttcttttctttttttttcttttctttttttttttttttagacagagtctcactcttgtcacccaggctggagtgcagggccacaatctcagcgcactgcaacctctgcctcctgggttcaagtgattctcctgcctcagcctcctgagtagctaggattacaggcatgtgccaccacacccagctaatttttgtatttttagtagagatggggtttcaccgtgttggctaggctggtctcgaaaagttttcacattttaaaaagtctttaaggattttgattagaattacattgtctatagactaatttggaagaattgatactttatgatattgaaacttcctatccatgatcatgatcatgggctccctatccttttttttttttttttttttttttttttttttttttttttgagacaggttttgctctgtcactcaggttggagtgcagtggcacaatcatagctcactgcagccttgaattcctgggttcaagtgcttctcttgtctcagcctcccgagtagctaggactagaggcacacagcaccacacttggcttttttttttctgtagagaatacaaaatttaaaaatttaattttttgtagtgtctcactaaactgggattacagatgtgagccactccacctggcctcctcctccaatttttaagagagtcttttaatgtcttttgataacctttttaaattttcagcacaaagacactgtaagtcgtttgccatatttttaggtgggtataatacgtatgtttagttctactaggaataaataaatcttttctagttttttgtctttaacatcttatgtttttgatttcttattctactggctaacactcccaggatgatgtttagaagttgaacagaaaggtgatagtgagaacccttttcatattcctgattttgaaagaattgttgctggtgctgtggctcatgcctgtaatcccagcactttgggatgctgagatgggagamtctcttgagcccaggagtttgagagtttgaggggatctgcctgggcaacatagtgagactccatttcttttttttttttttttttttagacagagtctccctctgtctcccaggctggagtggtgcagtggtgcaatctcagctcactgcaagctccgcctcccgggttcatgccattcttcctgcctcagcctccygagtagctgagactacaggtgcccagcaccatgccyrgtattttttttgtattttgtatttttagtagagacggggggtttcaccatgttagccaggatggtcttgatctgacctcgtcatctgcccgccttggcctcccaaagtgctgggattacaggtgttagccaccatgcccggctaagaccccatttctttaaaaaaaaaaaaaaaaaaaaaaaaaagccaggcgtagtggcatgcatttgtagttctagctgcttgggaggctgaggcgggatcattgcaggagattaaggcacccacaaagatgcacttaaaccagttgtttctgctgagagcagctgggatttgtcactggatttgccaggtatagagactcgccagctgccatcaatgcttctggtcctttttggtcagctgctgcttcatactacgtaggaaagattgttaaagcccagtgcactgtttcctctggtcactcctctgctatcaaggtgttctcttttgcgttatagaaagcttaaagttcatctaagtccagaccagtactcctataggaatataatgcatgccacaaatgtgagccacttaaataattttaaattttctagaagctacattaaaaagtaaggagaaacagatgaaataattttttaaaccactacatccaaaatattattatttcaacatataatcaataaaaaatagtactgaggccagcacggtggctcacacctgtaatcccagcacaggccaaggcagggaggatcgcttgagcccaggagtttgagaccagcctggacaacatggtgaaaccccatctctacaaaaaataaaaaaaaaatgagtgggacatgttggcacatgcctgttagtcccagctactcaggaggctgaggtgggataatcactgagccaggaaagttgaggttgtagtgagctgtgattgtgccactgcactccagcgtgggtgatggagcaagaccctgtttccgaaaaaaaaaaagaaaaaaaagatatacttaaaatttattctaagatgaagtcttcaaaatcaggtgtatatatcatgcttacaacacattatataatttatggctcctgcctagcaggggtcatcactgttagttcaacttttctttggcaagtctactccctgtgccccaccgtacactgctacattattgtttgtatatgtgtgtgtgagactgcatttaggcaactgtaataggttgaatttggttatttaatctctgtccaaaatcacatcacaaagatgccttgattatagaaagatmcttccttgcagcatattagttatttgacaccctcagtggatataagtgaatattttgagggaagaatagaaaagatacaatttttatttatttatttatttatttatttactgagacaagttgctgctctgtcgcccaggctggagtgcagtgacatgatcttggctcactacaacctctgcctcccggttcaagtgattcttctgcytcagtctccctgagtagctggggttacaggcatgcaccaccacacctggctaattttagtattaataatttatttttaaatggaataataatttcactttcttcttaccagatctttctgtctgggttgtttgcttttatgagtttttttgtttgaatctcccttttacattaaacaaaaattaacattttattatgggaaatttcactatgctattagaaaagcatagtgaacccccaggcatcatcagtgatattcggtgtatagcagttcacggacagttttgtttcatctataccaacacctattgcttatcctccttctgtgtcccccagttactttgaattaaatcttatacatatacagatgaatattatcacttcatctgtatcagaatgttatttttattaagaaaattatttttgagatagggccttgctgtagtgcccaggctggagtgtagtagcatgatataactccctgcagcctcgaactcctgggctcaagtgatcctcccacctcagcctcctaagtaactgggactacaggtgtgtgccaccacacctggtaacagatggttttaaaaactacaatacattatcacacttaaaaaaattatcttatctaaaataactattcagattttcccagttatttcataagtgatttttttttttttttttttgagacacagtttcactcttgttgcctccaggctggagtgcaatggcccgatcttggcacactccaacatctgcctcccgggttcaagcaattctcctgcctcagtctcctgagtagctgggattatagacacccaccaccacgcccagctaatttttgtatttttagtagagacaggatttcaccatgttggccaggctggtctcaaactcctgacctcaggtgatctacccgcctcagcctcccaaaatgctgggattacaggcatgagccactgtgcctggccttcataaatgatttttatggttcaaatcaggatccatataaagtccatatatgtgtctttttttagtctatagatttcccttccatctcctctgcaatttatttttggaagaaactgagttattgagtcatttgtcatctagaatgatgtacagtttagattttgctgactgcattccatggtgtggccaaacttcctctgtctggtgtatttctcataagtgtgtaattagatggaaaggcttggtcagatttaaattagtttttttttttctacagggatatttgagaggtagtggtatgtatttccatcaggaagcacataatgtcttcttggctctctttgtgatgttagtagccatcaatttcagtgcctagatacattaattagatttctgtatctcctactatctcaaaattttccatcttctgtctgtgctacattctgagtcctttcttcagttataaattctaattcattgtataattcttgttaatctgttgactttctaaaactggcttttcatatctaaaaaaatttccttttttcaagtctgttcattcctcatagttcttactaattggtcatttttacatcctttttttttttttttttttttgagacrgagtcttgctctgtcatccaggctggagtgcagtggcatgatctctgctcactgcaacctccgcctcccaagttcaagtgattctcttgcctcagtctcccgagtagctgggattataggcatccaccatcatgcccagctaatttttgtatttttagtagagatggggtttcatcatgttggccaggctggtcttgaactcctgacctcaggtgatctgcccacctcagcctcccaaagtgctgggattacaggcgtgagccactgtgcccrgcctatccttaactttagacattgcacacagtacaactgctatccgtatcggatagttcttaaggtcagcagctattgcttattgtgtctgctgactctcttggtagctgcccttcttttgtgtctagtgatctttgagttcattgtttgatcttaaccaggggaactgtatgggccaaaattaggattgaggatatttttctccatagaggattttccttaacttttgcagcagctgaaagatgccattcagatggatctacattagtcatgatgccagaattgggcaaatctgctgacaccaggacacctgtgtatatgtgtttgtgtctttccaggaattcattgaagagttgctgtctcccccttttgggggtttagtggcatttgtgaaggaggctgaggctttgaytgagcgtggacaggctgagcgacttcgaggggaagaaggtatgaggaaaatatggtartgatgggatcagtggtaagggaagtggaaaagaaaaatgaaaggatgcagattacatggtgggggaatagagtatgaaagactggattgagagaataccagaaaagagggtttgatgataaggatggctataccttggggagaacttagtggagttgaagatcagccagatccctctctgacactgtttcctcctgctattagcccgggtaactcagctgatccgtggctttggtagttcctggaaatcatcagtggaatctctgagtcaggatgtaatgcggagtttcaccaacttcagaaatggcaccagtatcattcaggtgacctgcaagtcccaggccccactcagatcccccatcattaattattttccccatctttttgctgggctcagcatcatctaagtgacccttggtcttcagttactagctgtgcccaaagttctgtatgagccctaacctgattcttttttktttgtttgttttgttttttttttgagacagagtctagctctgttgtccaggctggagtgcagtggcacagtctcggctcactgcaacctctgcctcccaggttcaagtgattttcctgcctcagcctcccaagtagctgggattacaggtgcctgccaccacaaccagctaattttygtatttgtagtagagatggggtttcactgtgttggccaggctggtctcgaattcctgacctcgtgatctgcccgccatggcctcccacagtgctggsattacaagtgtgagccactgcgcctggccgcctaacctgattcttaatcatcactattagcaccattttacggtttgatccctcaatgactttctttgaccagggagcgctgacccagctgatccagctctatcatcgcttccaccgggtgctgtcccagccgcagctccgagccctccctgcccgggctgagctcatcaacattcaccaccttatggtggagctcaagaagcataagcccaacttctgatgtgccagaaaccgccctgagatctgccrgtcatctccatggacttctgcaccccattccatacccttcttcmcctggggtaccccttccagttttccccttgcttcccaggcccttgacatggcttacctgccttcactcccagcaccttgcccaacaggataagctggatccccttggccttctgaatatcccagtgtcttcaggtttcccaagaccacttccctgtgggcttccaaaatggcctttatcatttctccagtctgtcaccctcctttcctgctcccatacacccaaggcttgtttcttcccctgtaaaaaccactgcctcaatctctggttcactcaactagtcaccatgtcctgaggcatgaagcctcytcagctcttggaattgctggcaaggggtgactgcctctgagtcattgtgtttttcaragtgatttcttttctgtagctttttgacctaagatctcagcaatttgaacactaacctctcccctcctggctcaagaattactccgaagtcagtctgcagaaaataaatatttagtatgacatgacacttatcccatttcctttctccttcctcctgaaggtttttcaggtggccccatctctagaatgacctttcctttctgactacttcctgggcttacatcccttctggtgggtgtaacctctaacctctagctactcccaggccattggaggaaggtggcccctggctaaaatagcagatgctgcaagggatgagaaccaggccgcgcagccccagacactgtcccaagggctcccttgggacaagcccaagctgactctggaatccctcctccgtagcagctccatagctcctctggttgtggctgtgacagccccttgctcgggggctgcagcacccaacccacacccacaccgttggggcagggctagaccaggcgaaattcgtaccatccgtttgtttgacttggagccttcctgctgtcctcgcctatacgcctcgtttgaacttaggctctagactggagagacacggggacccctttaaggcctaagaagagaggcgcagttaaggaaaaatgttacgtttcctgtgtcctccacccctacggcctaaacattccctccccaggtccctggagagtggtggaaagcggttcctccccgcttaggcccttcggatgcaggtctagcccgtcggcaacgggaggtgtcctgagtgggtctgtgactgccgagcacacccgccgcggagcggaggctgctgcttcctgaggctgagagtggatccggctccgggctctcctaattggcggacgctggggggcggcgtggtaaggcagaacggagcggcatctcagctctcgccttttcagggttccgccccatatccgagagccgctctctaattggcttgggaaaccgtatctcagcgctttggcctagcgactttgaacgtgtttgcgcctgagaccgaagtgcagaagagggcgagcgcaggaggagaggcttggtgaatcagcgattcctgattggccaggcgtgccttgagggcggggccagaactgcgtccttaactgacctcgcccttgcccagatcaccgcctccgcgttgctccgggtttaccccgcctgactcgctgcgctatgcgttccctcacgcctgccggatgccaggcggcgatgtgccaggctctgaggggccgcgagctcaccccagacgccggccccgggaatcctctgctcctccactttcccttcccgctactggtttcttgcccacccactcccaggtgtcactcttgggacatccagatgttctgacatttgacctgactccagcctcagcgcgaggacgggagaagggccaagggtatgagattttggacaggagaggcattggctactctgacaaagagcgtggattcccaaagaaagggtccccagataccccgcaggggagactgtcgagacaggcgactttagccaactaatgctcgcacgcgaggagggctgtgcaggcaggcaccacggttcttcacagccttccttctttccttcccctgtccgtcgcagaacccaaatcctcagagctgatcgagaagcgcgtgttgttgcagaagtcactgaggggcagacctggaatgtgagccgtggggcgaagggacagctctggagactcgtgattccggaacccggtgggcattcaagtgatactggagcacgcagttttcggggacattaagctcgccccaggggtccacaggaaccctctgacccaacggtctctctggacaggatgatccagaacagacggtgaagagacaaaacagcgtgaaagggagcggcgatacctaaactgacctccggagggcagcatgatcaagggaaggagctgttctcgctccgctcaaacccccgcgcagcctctgcagcttactcctgcttcggaaggcggcgaggttccacccccaccaccccggtccccgccgccctcttcgcgctgaagctgcggagggtctttttcttcagcccccaaatcctctgctctgtggcttaagattcccaggcttaaacccataactgctagggtcatcactcctcaaacttctccctcacttgttttgctgatgacggacacaggggcctcacagactcagaagcatctggagtcatttcgaaggacagaactgtggcaatatcctctttccccctcctaatctctgagaacagtgtctgtatatggcacgggggtccctagtgtcatatagaaggactcggagatgtcctcatgggctgtaacggcccccggtgctattcagggatctctgttctttaaagaaatatcatttccccttatttctctacctttgtgccctcacctcgccctgaattgtttcttaaactgggctttctgggaaacgtttacttcgtgttcaacagcaaagtctcggcataaggcgagggcggcagggggtggggggcgggcgtttgctcgccttggcattaatttcagagctgctgaacgtggacaaaagagagggaacatcctcctttcttccattcctgtaaatatggacccacccaccctccacttaagatgggtggcttttctgattttaagatatcaagcagcctggcgaggtggctgacacctgggatcccagaactttgggaagccgaggcgggaagatcccttaaggccaggagttctagaccagcctggccaatatggcgaaaacccatctctactaaaaatacaaaaattagcctggcgtggtggtgcctgcctataatcccagctactagggtggctgagtcaggagagtcgcttgaacctgggaggcggaggttgtaatgagccgagatggccactgcactccagcctgggtgacagtgagactctgtctcaaaaataataataataataataataaaaagatataaattggctgggctttaaaataaagtagtcagaggcccagggtggtgactcatgcctgtaatccttttggaaggcagaggccagaggatcttgagcacaggagtttgagactagcctgggcaacatagggagacccatctctaccaaaaaaaaaaaaaaaaaaaagcaaaaagccaagcatggtggcccatgcctgtggtcccagctagttgtgaggctgaggcaggaggattgcttgagaacaggagttagagattgcagtgagctatgattgcactactgcactccagcctgggtgacagagtgagaccctatctctttttaaaaaattaaaaaacaaagtagatttagtgtgaagattcaaggaaagaaagagaaagcaagacaaaactttaaggagaggagaatcgaaattggctgacttcaccctggacataatggacacagctattcatgttacgtactagcgttaacaaagtgttttcagaagcagttgtcattaaaccaacacatttattgaagctcttctctgtgttctgtgataggcactgcggattcagcagagactaaatcaaagtccttgatctcggagagcacatatttcatctaattgaattcacataccagccttatgaggaggtgttcttcctgtttcaggtaatgagcttgaatttcaaataatgagttcaaaaccatataggcactcagtggctgaaccttctgtgcccacattcagcttttgttctatgactccaggctgggagtcatggagctgaggaggcagccggttgtagagaagcaacagattaataagtaatagtaaattattgaaaaaatatttacagaactgaaggaaaagctgaacaggcggtctttggaaaggacagaagccaggatagttccagcatccaggcagcagacaccaatggtcagtgcttctactttggatcaaaaagagagaactccaataggcttagggtgggtcaggtgctcacactcatctgaggaaggggagggtcccttgaggaatagtaccatagactacccaatgttggaggataatggccccaacgcaaaaatgggatcttgccaccagacaaatgggatatagatgccaggctgcaaaatccaacaaatgtacacgtgcccaaatcccgactccatcactaatagccatgcaatcctctgactatcaattagattaattgacactcttttttctctcgctactgtggtacatgcagtagttacctttattcttcactttgttttctcataagactaacaagcagttttttaaaataaagaaataaaagcaaaattgcttattgtcttagtctattcattggcaaactagtaacattaaataaactccagacagagccactggagaagaatcaagtacaacttagtagaaataacaccgtatgtgtgaaggtgagtgtgtgtgtgtgtgtgtgtgtgtgtgtgtgtgtgtgtgtgatggaaaatactttgtcctgcccaaactgtaagtcatgaccatgcccctctcagcagaagtttatcttcatctcatttggaagtttataagaacacagcttaaaaaaaacctgtgattttggagcaaggtcaagcctttgctattgcttccacattttgttttgttttatttatttatttacttttcagttttttggagttttctttatttgtttgtgtttttgagacagggtctcgctctgttgcccaggctggagtgcagaggcaccatctcggctcactgcaacctctgcctcccgggttcaagcgattcccctggcttagcctactgagtagctgggattactggcacgcaccaccacatccagctaatttttgtattttcagtagacactgaaatacatgtttgccatgttggctgggctggtctcaaactcctggcctcatgtgatctgcctgcctcggcctcccaaagtgctgggattacaggcatgagccaccacgcctgcctagtttttagttttttgagacagagtcttgctcagttacccaggctggaatgcagtggcatgatcacagtttactgcagcctcgacctcatggatttaagcaatcctcccacctcagcctctgggatagctgggactacagtcatgtgccaccacacctggctaatttttgtattttttggtaaacgaggtttcaccatgttgcccaggctggtcttgaactcctgagctcaagtgatctcctacctcggcctcccaaagtgttggaattacaggcatgagccactgccccagctgttttattaatttagttaaaaatatatgaaaagaggccctgcgcggtggctcacgcctgtaatcccagcactttgggaggctgaggtgggcggatcacctgcggttttggagttcaagaccagcctgaccaacatggagaaaccccatctctactaaaaatataaaaaatcagctaggcatggtggcacatacctgtaatctcagctactcgagaggctgaggcaggagaattgccctaacccagaggaggttgtggtgagccaagattgcgccattgcactccagcctgggcaacaagagcgaaactctgtctcaaaaaaaaaagtatatatatatatatatatatatgaaaaggctgggtgcggtggctcacgcctgtaatcctaacactttgggaggctgaggcaggtggatcacctgaggtcaggaatttgagaccagcctggccaacatggcaaaaccgtgtctctactaaaaataaaaaaattagccaggcatggtggcaggcgcctgtaatcccaactacttgggaggctgaggcaggtggatcacctgaggtcaggaatttgagaccagcctggccaacatggcaaaaccctgtccctactaaaaatacaaaaattagccaggcatggtggcaggtgcctgtaatcccaactacttgggaggctgaggcaggagaattgcttgaactcagggggcagaagttggcagtgagccaagatcacaccatttcactccagtctgggcaaaagagcaagattctgtctcaaaaaaaaaaaaaaaaaaaaaaaaaaaaatatatatatatatatatatatatatatatatatatata

SEQ ID NO: 97063 - DNA, 12604 bp, Homo sapiens
cacccaggctggagtgcagtggcaccatcatagcttactgcagcctcgaactccttggtttaagtgaccttcccatctcagcctcctcagtggctaggacttcaggtacatgccaccattcctgactaatttaaaatattttttttgtagagacaggggtctcaccatgttgcccagactggtcttgcaatcctcccacctcaaccttccaaagcactggtattacaggtgtgaaccacattgcccagtcttaaaatatattcctaataataattattttagtggctgtgtaataatccctcgttgaatgtacccgtgcaccataattcatgccattattgttatacattcagagtattgcagaaataacactattttaagcaattctgcagtgaatatctttgaaattttattctttaaaaaataattccggctggcgcgctggctcacgcctgtaatcccagcactttgggaagccgaggcagacggaccacctgaggtcaggagtttgagaccagcctggccagcatggcaaaaccctgtctctgctaaaaatacaaaaaaaaaattatccaggcatggtggcgggtgcctgtaattccagctggaggctgaggcaggagaatcttttgaaccagggaggcagaggttgcagtgagccgagatcgcaccattgcactccagcctgggcgacagaacaagactctgtctcaaaaaaaaaaaaaaaaataaaataaaataaataattccaagaagagaaattacaggcttgattcttttttagtaattacttgaattgacacctttttggtcatagttcttttaagttatatttgtgacaataatgtgttctcacctatacatacaaatgtttttccctaacagtcttcttctcaatattttattatgataaatttcaagcatacataaaattgaaagaatagtatagtggacatgtatatacccattatcagctttgattgtatgtatgtgtgtgttccctgtatcagttgaaaggattcggatatcatgacacatcactcctaaatgcagctgtgtctgtttcctaaaaataagaacattctcctatgtaatcacatcattattacatataagattaataatactggccaggcacggtggctcgtgcttgtaaacccagcactttgggaggctgaggtaggtggatcacctgaggttaggagtttgagaccagcctggccaacatggagaaatcctgtctctactaaaaatacaaaaattatccaggcatggtggcacatgcctgtaatctcagatactcaggaaaccttaggcaggagaattgcttgcatctgggaggtcggggttgcagtgagccaagattgcgccactgtactccagcctgggcgacagagtgagagtttgtctcaaaaaagaaaaaaaaagattaataataattccctatcattcaatatccagtctatattcaaaattaccatattaaatgtataacttagaattggaagagcctttaatgatatcactttacagtataaggcttcccaaatcccacagtagagattctgattcagtagttctgagtggcattcagaaacctatacttgtaactttacaacaaaacaaacctccctgtacctgggatgactatacatcccagttttcctgggactgatctcgtttactactgttgacccatcataatagtaatagtacccaggccgggtgcggtggctcacacctggaatcctagcactttgggaggccgaggtgggtggatcacgaggtcaagagatcgagaccatcctggcgaacatggtgaaaccccgtctctactaaaaatacaaaatacaaaaattagctgggcgtggtggtgtgcgcctgtagtcccagctacctgatgctgaggcaggagaatcgcttgaaccggggaggtggaggcggaggttgcagtgagctgagatcgtgccactgcactctagcctggtgatagagcgagactccatctcaaaaaaaaaaaaaattaatagcacccatcactttcagaagttagacagtaaatcacatggttactctacttttaattgttcaaaagagaaaataggatcccgaggtagttaagaggtttatttgctcagagtaatcaaagtttcatagttttactttgtactcaagatagcagttgcaaaatggataatatgcttaacaaatgcatactgatcacatatatgaaactgcatgttgatttacatttaaatatattgcataatttgctgcttttaaatgtaatgccttattcctacaatgggaaaataagtatgcaaataagctggtaagtaggaagactgggtgaacggcagctaaattttgagtataatttccttggccatgaccaaatttattaagtctagtctggaaatttactaacagcagttgaaaaggtcttcactgtgctgagcatgctgcttgagtacacaggtgctaataagtgctagttggataaataaaaatgttaatagattaatctttctgtatcacacatcaaaatatttttctgtccttaaaaatccatgtaaatgtgaccttattcacatagcctatcctgaatactttataccgttaagatactctcttttattttttcttgacattaattttattcaatggtaaataatagaaaattgtaattttaacagagtgtatttgtgtgacatgctgcccttgttgaaagtggatcctatgtttttaaaacatattttcataaaatggcattattgaggtattattcagtagcttcatttacctcaataaggtaaattaagctgcacatacttaaagtataaaatttatttatttattttattttattttttgagatggagtcttgctttgttgcccagtctagagtgcagtggcatgatctcggctcactacaacctccgcctcctgggttcaagcgattctcctgcctcagcctccctagaagctggaattacaggtactcaccaccacgcccagctaatttttgtatttgtagtagtgatgaggtttcgccatgttggccaggctggtctcgaactcctgacctcaggtgatccactcgccttggcctcccaaagtgctgggactacaggcatgagccaccactcccagccttaaagtataaaatttaatgaactttgacatatgtatacacctgtgaaactatcacgacacaagataatgaacatattatcactgcaaaatttcctctcagattccttgcagaaatttctctcctccccccttaacttttcccaggtaactgctgatctactttttgtcactatagattagtttacattttcaggaattttatataaatggaatcatgcaatatgtactctcattttcctggtttctttcacttagtataattatgttgagatttgtccaggttgttgcatgtatcagttggttgtttctttttattgctgaatattcattacatggatatattacaattcatcttacccatttatctgttgatagatattttaagtttttttcagtttgtggctaatataaatgaagctgctaagaacatttgtgcacaagtttttgtgtggacatatgttttgtttctcttgggtaatttatggtagacagactctggtggctacccattatctatttccttgaataattctttgctttttgagcgtgagtgggatctgtgacttgcttctaactaaaatacagcaaaggtgatatacgtgattatatatacatgattacattatacaagattgttaagtcaatcctgataggaaagatgatctcctgtgctggctttgaggaaggcaagtgcccatgttgggaaggacaacacaacagggagctgatggtggcatctggttagcagccagccaaaaaataaaaaatatggtcttagtctgacagcccacaaggaactgaatgctgctaacagccatgtgctcttggaagtgaatccttccccagttgagcctcaaataagcctttgtgagaccttaaaacaggatggaaaattgtgagataataaatgtgtatttatttatactactacatttgtagtaatattgttacgcagaatagatgtgaatgcagttagtaaatatcttgtagtgaaatggttgggtcatatggtaggtatatatttaactttttaagaaactctcaaattgttttcctaagtggttttaccattttgcatatccaacagcagtgcataagagttctagttgctccacatccttgccaacatttagtgtggtcaatctttttaactttagctactctagcaggaatgtagcagtatactattgtagttttaatttgcatttacttaataactaatgttgaacattttttgtgtgcttatttgtcatctatgtatcttctttggtgaaatgtttttaaatatattttgcctattttttaaactgggttgtttatcttattactgttgagttgtaagagttctttatgctttttgtgttgtattcatctttgtcatacctaagggcactgagattttcacttatgtttttttctggaagttttatatagttttacctcttacatttaggtctgcgatccatttcaaatttaattttcgtgtatagtgtgaatgaatgtggaggttcattagtttgcatatggatgtcaaattgttccagcatcatttgttgaaaagatacgctttttcaattgagttgtcttggcacctttgtcaaaaatccaatgacagtttaattgtcagcataatttgatccttttaaaatatatttttcataattgtatgctaccttgtattacaattatttccatttattcattattaaacagaaagctccttgaggacacaactgtctttcttacttctgaattctctgaaatgcagcatatgccttgcttatagaagattctcaatgaaaatgtgatgtgtttaagtaaactttagcattcatgactcttcacaggccttggctgagtcataccaaacaggtttatgatttggcatcctttcagaccaatcatctttaaaatttttttttactatattaatttggggagactgaacactgtgtgttagaagagcagaaaaagaggactccttttgtattagtaaagttctggaaagaaaactcgtggcatactcagggaagttaactgaaaatttaattaagggactatttatagagatggaggcagggttaagggaatcaacaactacttatactaagccttcagaatgctccagactgcaattatatctttcatctctatagttgacataggaggaatatgctaatacagtatgattaagcattgaaggggttcagaatatgccaccccaaaatatgctactttggcctaagtattattttgagccgaagccaattgacaaccagtagatgcagttatgtcagtcactggagagcgttagcaaatgtattccaaaaaaaaaaaaattgcttaagataataaccacaatcagctcctcattgaggtgggcaacattggatggttatgacaaggtgaggaaagaattgtctagtttgaagattcttggtactatatttagtttctaggtgaagaaataaaaaggaaggctgggcatggtggctcatacctgtaatcgcagcactttgggaggccaaggcaggtggatcacctgaggtcaggagttcaagatcagcctggccaacatggtaaaaccccatctctactaatcatacaaaaattagccgagcgtggtggcgcatgcctgtaatcccagatgctccggaggctgaggcaggagaatcgcttgaacccagcaggcggaggttgcagtgagccgagatcatgccattgcactcagcctggatgacaaaagcaaaactccgtctcaaaaaaaaaaaaaaaaaaaaaaaaaagaaataaaaaggaaaaaacaaaatatagttttaaattggggcaatttatctgtagtttggtcaggctaatgtacactgtaagcttgaaatgcaaatttctaatttcagagtctaaatatttgtttctcagatttcattttgatgatggaatgtatactagatgcagagtttgcatcaatttttgtaatatattcatttatttacttaactaattttaatttgccataatagcaggagctttttgtttatgtttattgttgtatccccagtgcctagaatagtgcttagaacatagtagcacagagaaacatttgttaaatgaatgaatgaatgatagaataatggatgaaacatggaatatgaattttagtggaggtgacaggtaataagtataaaaatcaataaataatgtaatttcagatggccttaaagacagcaaaccagatttaggtgatagagaataactggagagaatgttgggatggtttttaaaatcttcataataaccctatgaagtaggtatttttatctcccttttttagaagaggaatttcagacttgcctagggtcacaaagtagtggaaccacgctaatctgrtttcattaatttattccttcattaaacattccttgagtgcctgctcaacactgagccagagtctataaaatcagagtaaaacagtctttgccttcagggagcttataatctagctctgtgctgtctaatatagcagccacttgtttctcatcataattgagatatgctgtaattgagatatgctggattttggagacttatttaaaaaagtaaaatgtcaataatttaaaatattatatttaaaatgatattttggtgtattagataaaatatattattaaatttaacatttctttttattgttttgaaagtggcttctagaaaatttaaaatggcatgtttgacttgcattgtagattctgattcagtaggtctgggcccaagataatgtatttctttttttttttttttttattgagacggagtcttgctctgtcacccaggctggagtgcagtggtgccatctccgctcactgcaagctccgcctcccaggttcacgccattctcctgccttagcctcccgagtagctgggactacaggcgcccaccaccacgcccagctaattttttgtatttttagtagagatggggtttcactgtgttagccaggatggtctcgatctcccgaccttgtgatctgcccgcctcggcctcccaaagtgctggaattacactgcgcccggcccaagataatgtatttctaaaaactttcaagtgacgctgatgctgctgttctgaggaccacactttgagtagaaaaacttagactagacagaaaacaagtaattagagtactgatgtgatgctttgtatgactgggcaagcagagggtgcttagagtcttcgttttgttttgctttgtttttcactctgcaaaacaatctatgttcggttaaagcatttttgcacaatttttatttcctccataactacataaatatagatttctctgattcatgagtttatcttttgccatttaatgattatatacactagagagcagtatctattttatgaacagaagaataaggggccgggtgcagtagctcacgcctgtaatctcagcactttgggaggccgaggcaggtggatggcctcagttcaggagtttgagaccagcctggccaacatgttgaaaccccatctctactaaaaatacaaaaattaagtggcaggcacctgtaatcccagctactcgggaggctgaggcaggagaatcacttgaacccggaaggcggaggttgcagtgagccgagatcgcgccattgcactccagcctgggcaacaagagcgagacttggtctcaacaacaacaacaaaaaagaaggaatgtaacatcattataaagaagacataaacaagtattacatattatttactataatgagaaaatatccaaaataggtcactgaagtagattctcccaattgtgaacaatagtttttattgtaagtcaaaataggaaatattttccagaggttgcacaaacagattaaaccacagaaataacattatttcagataaatggtcaatccctctgtggtcttagacatttagttttgggtagagaacatggaaaacttcctgaaggaagtgatttctaagctgagaaacatcaataggcactagccaggtctgtaagtctctaacacccatgctttaactcatattttggatcaagtttttgtattctttcattttagtgtttgttttgtttttgtttagtttgctataatattttatctgaatggagactaatatcctttgaggagaaacaatttcaagtttattaattaggtttctgtttaagactccatcataatataccatttattagtttataattcagattctaaacctattgtaagagtgcctacttgcaaaaagcaaagaaccagaggttcaggatttgtgaaaataaaaatactgtaaaatataaatgtttaaatattttcttttctttttttttgagatggagtttcgctcttggttgcccaggctggagtgcagtggcgtgattttggcttactcaatctccatctcctgggttcaagcgattctcccgcctcagcctcccaagctgctgggattacaggcgcccgccaccacacctggctatatttttgtagttttagtagagatggggtttcaccatgttggccaggccgttctcgaactcctgacctcaggtgatctgcccaccttggcctcccaaagtgctgggattataggcatgagccactgcgcccagccaaatgtttaaatgttttcactattagatatgtctaataagaactaaaggaatatcttcttgaaattgaaaaggaaataatatttttctatcccataaggattgttggaaaggtttaaagagacaataatatacgcaaagtgcttacttagcaagatgcctagtataaggaaggtagtataagaaagtaatgttttgtttttggtgtccatttggggttctctagtagtttggacaggttattttaagagtaatcctttatgaaaattataatgtacacattttattttgggacaaggattctaatcatttcaataatttatttttaagcacagtttactggggtctcaacaaaagtcacatattcagaagtagtatggcctctaggctaggagtctagagacctaggttttagttctagctctgttaatcctgttttactttgtgccaatcatttcaaaaaaggatgctttactaattgctctgtaaggtgctttctagtctgcatcggttttgttgagactgcaatagcaatgtatccaaggtccaaactaatgatttgccatctggtttcatttagcaaagttaatgttcggtcatcaagtacatattcagtaggaagtattctttttcgaaacagtttctacagtcatttttttttaaccctgtataaaatgagtttattttggactgttaaaaaaattcaaaactttaaaatttgttatttttcaactaatgcaaaagaatatattagaaacatctgaataaaaaatgattctgggctgggcacggtggctcacacctttaatcccagaattttggaaggccgaggtgggctgatcacctgaggtcaggagctcgagaccagcctgcccagcatggtgaaaccccgtctttactaaaaatacaaaaattagctggtgtggtggcggctgcctgtattcccagctacttgggaggctgagacgggagaatcgtttgaacctgggaggtggaggttgtagtgaacagagatcatgccattgcactccagcctgggcaacaaagagcgaaactccatctaaaaaaaaaaaaaaagattctgttcttttctgtatttactgatgtccctaaacattttacattttttttaaaatttaggttatctccctattaaaactatttacaagtgacagtgatgactcctgttactcaaaattaaaccaaaatgaacatcaaactgggatttattggggcccagaaacaagaagatataattcattcatttgaaaatgataaagagggactgaaataatagtgagaaagctgccctgagaccagagtaactttgtttctttgatgtatcatttacagtaataacccaacggggtgccaaggggctgccactctttggctatgctttattgtccattcacactttgtctccatgtttccttcccccttcctcctgtatacatgtatacagaagggggaaggaaacatggagacaaagtatgcatatacatatagaaattctggagcagtaacttactgatgtatacaacttatcgaatctctctgagttatgctactacccctagtgtgttgggcatgttggctcaaacttccttaatcaggaaactttggaatgggtttattgctagctgtctttgcttgggtttaatctcaatatttctgaggtgcaaagtgcactagattgagagttaatagatctgaattttaattccagttttgttcccaatgatcactgtgacctcaggcacatcatttcacctttcgtcgttcattcagtttatcttacctattcattaaaaaccaatctgcctgcccccagttgctttctagtggtagtgatgatggaggtggtgagagacacaataaatacataagcaaataggagaactatgaaggaaggaaaagttagtgatgtactagggatagtgtacttttgatagggcatctaggatttctctagataagtgaaaaatgaagaggtttaactggatgctaaggggtcttgcacattaaaaggcatgtgtttccgtcttttcactactgtgttctaggaaggcccaccaatgcctctaacctgtaaataaatgcaaatctatttaaatcaagtgatacatcaattttatgttgcttgatttggaagtaatccgcaaagaagcaatagctaaacattttagtgttgtttggggagtagctgctgaacaataaagaccaaaaccataactaaaaaacaaacaaacaaacaaaaaaacgcagcccgagacagatcagaaactaggtgtatgtagggcgccaggttatgacactgttctctgacatccacagggcgcaaaaagaaaacctcactagtcagcttcgcacgtgctctgcgcaggggctcctgcgaggccctagtccctccctgggagctaagagcaggacggaggctgtacctgactgctgcttggagggaaccctggctgagtccagggaggaggagccagaggaggggccgattggaagcagccacctcagcgaagctgcaggatttccgcagggcgggagctgtttatctcccggaagaaaacggctcctgtcacagaagtctcgtgattgctctgggagctttgcttagacacttgaaactacaggagaaagaaggatctagcgaaatatggctacagagagccctgctacgcgtcgggtccaggtggcagaacatcctaggtgggggagaggagacgccgggctttgggatctgctgggttggctacgtgtagatcgggtccacagcacttggctcctcccttggggcgctgcttttggtcccggggagcaagtggaacccttgggattctataaggacacgtggctgggcttgcaaaaaagatcacgccgcaaacacattctaccttgactactacgaagggttgtatgtttttttcttcatccatgcagattcttcttttccttttcttgttgtaattagtgtactctttctactgggcttcagcagaaatgcccatatccacactgaactcctctctttgtctcgcatgccagttgatactgctttttaaaagtcttctttctaaatattaattgaaaacaaacacaaaaaccttcttggtgtctgcatcctctttaaaacaaaacaaaacaaaaacacgagaatctctgaactgtcacttagggaattaatttgctggcagtccctagctacacagtaactaatagtttagtgatgtctcggggaggatcttttcagttacaggtactttgtagaaatacttcgttctgactaatggggctgaggtctcataaaatgaagtctgtcacctgctacattagcgaagggctttcctgactctctgcttttgctgtttttcttttcttttctttcttccttcctttcttttttctttttctttttctttttttttttttttttgagacggagttttgctcttgttgcccaggctggagtgcagtggcgccatcttggctcaccgcaacctccgcctcccaggttcaagcgattctcctgtctcagcctcctgagtaggtgggattacaggcaggcgtcaccacacccggctaattttgtattttcatcagagatggggtttctctatgttggtcaggctggtctcgagctcctgagctcaagtgatccgctcaccctggcctcccaaagtgctgggattacagacgtgagccatcgcgcccggccctctgcctttgctgttttcagtttttttctgttagtttttttctctggcatcaagtccttaagctcttcctacttggtggtttattac

SEQ ID NO: 97064 - DNA, 77341 bp, Homo sapiens
aaaaaatagcctggtatggtgatgcatgcctgtagtcccagctactcaggaggcgggaggatcacctgagcccagaaacttgaggctgcagtaagccatgattatgccactgcgcttcagtctgggtgactctcttaaaaaaataatgacaaagctggaggcatcatgctacccgacttcaaactatactataaggctacagtactaaaacagtatggtactggtacagaaagagacacatagaccaatggaacagaatgagcccagaaataaggctgcacacccacaactatctgatcgttgacaaatctcacaaaaacaagcaatgaagaaataactccctattcaataaacggtgctgggataactggctagtcatatgaagcagactgaagctggaccccttccttgcaccacgtacaaaaataaactaaagatggattaaagacttaaatgtaaaacttaaaactataaaaaccctggaagataacctagtaaataccattctggacataggaactagcaaagatttcatgacaaacatgccaaaagcaattgcaacaaaagcaaaaattgacaaatgggatctaattaagctaaagagctcctgcacagcaaaggaaattatcaacaaagtaaacagacaacctacagaacaggagaaaatttttgcaaacaatgcatctgacaaagatttaacatccaacatctataaggagcttaaacaaatttataagcaaaaccaaacagccccattaaaaagtgggcaaaggacatgaacaattttgaaaagacatacatgtgtctaaaaaacatatgaaagaatgctcaatactgctaatcattagagaaatgcaaataaaaaacacagtgagatactatctcagatcagtcagaatggctattactaaaaagtcaaaaaataaacgctggcaagcttgcagagaaaagggaacacttacacactgctgataggagtgtaaattagttcaaccattatggaaagaagtgtggcaattcctcaaagaactaaagacacaattgccatttgacccagcaatcctattactgggtatgtacccaaaggaatataaatcattctaccataaagacacatgcatgtgtatgttcattgcagcactattcacaatagcaaagatatggaatcaatctaaatgccctcaatggtagactggataaagaaaatgtggtacatatagactatggaatactttgcagccatcatgtcctttgcaggaacgtggatggagctggaggccattatccttagcaaactaacacaggaacagcaaatcaaatatcatattctcccacttataaatagagctaagtagtgagaacaaatggacacaaacagagaacaacagatactggggtccacttgagggtggagggagggaagagaaaatataactatcaggtactatgcttagtgcttcggtgataatctgtacactgaacccttgtgacatgagtttacctgtataacaaatctgcacatgtacccctgaacctaaaagatcaaaaaaagaaaaaaaaagaaatatgtgttggaccacaatttcagatatgcaaagaataacatataaatttatatttataaatataaatcaacctagctttaattttgagaattctgctcttccagtttggtaaaaaacttaacttcagttattctagggtttccctcttctgtttcaagatgggatagatttcaagagttttatgtatggccaaagctaaggcatctgggtgttgagtcattcgtctaccctgattcctcttctggggtattcattcactctgttcacacagtttctacagttctgaactccctcctacttccagaattattttaaaatatgggaatgtttatgaggggtccttatggacctatttgttcagacacatgaggcagccctgattctctggagtattgctgcctctgctatgtgcggtggtgctgtgtacagataaatatacaagcatggctccccaaatatgggggccataaattttctctatgctcccaggtccatgggactctgtgatagcttccctgggctgcttctcaaatgcactctagtgcttcctttattttcagtgcgcttggcatgaccttttgaaagggattcatgttttaccctagtcaggaagcatttatgacttttttccctcaacctttcctttccaatatctttttgaaaatatgaagaacagaaaaaaatgggataaatgaacacagtttaatatttcataagcccattctgccaataggaattaagttttgaccagaacagaggcagagtaaaattctgatcatgtcactcttctgcttaccatattataatggcttcctattgctcctggaatacagatcatatgccttaataaaacacatggagatcctgcctgcctctccaacctcttcatgcaccacagtcccttctcattctctctactgggaccaaacctgtgtttcactgtgaaaaggacaggtttttttattattattttttttttattttttatttttgtatagtacctcttcacctggttaactcccattcatgctgtaaagttgcagctttagtggaattcttgcagggaaagcttacatattgccacttattatagatactcatggcactatgtatcttttctttgtagcacttgtccatgatggttaccttctctcataagaagagaaatgcaaaggataactacaatttaatggcattttcacttgtcagactaataaaactccaaatgttttcacaataaattttttgaaataaatgagtactcttacctactgctggtgggattataaaactagcacaacctctgtggaggataagttggcaatatcttttttttaataccttttgtcccaggcagtctacttctggaaattgatcctatagatttattttcgtagtataaaatgacatattttgtctttattcattacagcatttctttggtaatagaaaagtactgaagaaaattaaatgttcctcaataggaggctgctcaaatacactgtgatatacccattcggtggaataccctgtagctataacaaaaacaaaaatgtgagaagcttcctaaataatgagataggaagatttttctgttaaaaaaaaatacaaaaaaatgcatatgacgtgctaccttttgtataaaaagggtaaaagtaaaaaataatatgtatgtgtatatacatatacacacaaacatatgtatccagtttgcctgtacaagcatagcgaaactctgaaaagatacacaagaaactaataaaaagaattatctatgttttggggaagaatgaaaactgacaggatatggaacagaataagatgtaagaatgaaaagtaatgaaaatatttaattatgttcccttctactgattatattatacatgattatgaacgaggcaaagttttgtttttctttttcagatggagtctcgctttgtcacctaggctggagtgcagttgtgcgatctctgctcactgcaagctctgcttcccaggttcacaccattttcctgcctcagcctcccgagtagctgggactacaggcgcccgctaccatgcccggctaatttttttgtatttttagtagagacggggtttcactgtgttagccaggatggtctcgatctcctgactttgtgatccatccgcctcggcctcccaaagtgctgggattacaggcgtgagccaccatgctgggccagttaattctttgaagccagcaatggtgtgttaaaaaagaaaattcaatctacaaataacaaaaaaaagacaatagttcaaagtattcctgtgcttaatctatcactataggtctattaaaacaagagcaacaaacggttgccaatgtataacttaaaacatccagagggttaccccatctacagttgcctaaagttattcttagttcctggagaattcatttagaagcataagcataataagggcacagtgaaatctaagtttggttctccattatagctgtggtcctaatgaattgtgggcccatcctgaattaataattctccaataaaaatgataatcaaagaatttaaaccattgatacagttcccttgttgatattaatctgttcattaatattacttggatcatatttccaaattacagagtgtaatagcatctaatgcactttcatagatcacaattttattcttttgtttcccattttacagttaatcctatgtagcagatattaaggaggcactaagcactctttgctaacaaactatccatttctttcatttaagtatttagcacttagttagcaaatgtggacttctcacttactgatttcttggtttaaaaactgtaggttcagtatggaacaaatggatttagtagctcttgaatatctttacactgtaaacttactattgataacttttatttctttagaagcaatatctaagtcctaggaattctgagcctgctcattattgttacctcccaaactagcggagtgtgattcagaacacaataacattatattttctttcctccttctcttcctccttttagagaatacatgataggatgttttcagctttctagctttcaacagatgcaatgatcaaagagtctgtccccctctgctttaataaatgtggaacattcaacatttggcatatgaagagtaactgggtacatctgaactattctgtgctcttcattctgttccctaaagggacagatacaaagagaaatcacataaactataatccagttgagtagatttaatttccttttcctatttggtctacatgcaccacctggtggtaaagtagtgcatttcacatagagagagagagagagagagagagagtgtgtgtgtgtgtgtgtgcgcgcgcgcgcgcgtgcacgcgtgtgtgttttgaggagtatataacatgaaaaagataattttaatatactttcttaatactgatttagatagacaacacaattattctacaccaagaatctaatacaacacttgagcactacttcatgtataacagaacaggaagtaaaggagagaactcatgctggaaagtaaaatagctttcacttatttaccttagcaatacatattataattccatctctaaattaacatttattgttccaatattcttattgaggcaaaaatcaaacactgataatcaatgtgaaaccatttcctcctttttaaagaataacagcttttaaaagtaggtgccctgttccttatattagtagtgagtataagtcacagatcacagaattgtaaagcaccatagaggcattagaccaatacaccaattttacaaatgtagcagctgagactctggaacagcaggtaacttgcccgaagtcatactggtcattagtggtccaacacaaataagaatctagatcttctcactttcagcctaggaatataatacataaaaattgtacttatattcatattcaatgaattgtctctgtatgatgtgataatattcaacttatctacacagtgctttaaggcactcatatgttagttaacacataccagttttgttctaacattctgagcacaaagaagtaattgaagaaatgcatgtatcataaagctatggaaaagattttctaagtattaaaaaaccctatatatatgttcaaatgaataattttccaagtataatacaactgctatattgcaaagaaggtttaaaaaattccctttccccttctaactgcttcagaaccagagatctgtttctacaaagtaggtacccacttgtagatttaagcataaaacatgttcatagctccctctcatgaccattgaatactatacaagcctccttttattctcgctgttgtattcaactaacagctcactggctaagttttaattgcttccaatgaggtcagcaaaggtatttatcgaaaagccctgaataaaaggctcacacacacacacaagcacacacgcgctcacacacagagagaaaatccttctgcctgttgatttatggaaacaattatgattctgctggagaacttttcagctgagaaatagtttgtagctacagtagaaaggctcaagttgcaccaggcagacaacagacatggaattcttatatatccagctgttagcaacaaaacaagtaagttactgttatttgtcttttaaaacaatgctgaatgttttctaaaagtttatctctttttctgattttagtactgagcaggaaagtaaagttacaagatttttgagccatgtaactatagtaattatgctgtagaacataaagataaggttgaagttctccagagcaatcctgacatttaacttaaaaaacctgggcagttcaggagaaaataattgattaaccacwaatgtaaaagcatataatraagaagtctagggagaaagcagttacactttgttagcrgtaattgtaaaaacttaatttaaatcaatagttctgagtgcagyatggttctcacaaaatagcaattggaatgaatggtacrgtcatattctgttttgtctctactcatgcataaattttataaatctacacataaagtggtaaagattttgacatcctctgtgaaggctgttttaaatgtatcttcaaagaataacctatactgtattctaatgctactacttacccactaaaatttacacatacaattttttatcttcctctctcctcccctccctattcttaatctctcattgcaaacagaagtcaaatagcaaacagcgtcacagcaactgaacttactacgaactgtttttatgaggatttatcaacagagttatttaaggaggaatcctgtgttgttatcaggaactaaaaggataaggctaacaatttggaaagagcaastactctttcttaaatcaatctacaattcacagataggaagaggtcaatgacctaggagtaacaatcaactcaagattcattttcattatgttattcatgaamaccyggagcactacactataatgcacaaatggatactgacatggatcctgccaactttgctctacagatcatgctttcacattatctgtctagtgggtactatatctttagcttgcaatgacatgactccagagcaaatggctacaaatgtgaactgttccagccctgagcgacacacaagaagttatgattacayggaaggaggggatataagagtgagaagactcttctgtcgaacacagtggtacctgaggatcgataaaagaggcaaagtaaaagggacccaagagatgaagaataattacagtaagtaattttaagtactgctcatgaaccttagcaatctgttaatggatcaattttcaggtgayatgttttctcatcttccttttgcttcttggaaaaaaaattaaataaaatgtcacctaatttctctaaattgaactatgttgaactatgcccctaaaaatatctcttttaacagggcaaatctacttacattatagttggacctgataatccaagccaatttgaaaatatatactccttgtcctgaaaatgctcataagttaagcaaaatgtaaataatattattcacaccaaaatgtgacttaatattgtctaagcaaaactcattaagatatctaatttagaacttcataaattatcactaaaagctatttatcactagtttaaagagtagggaaattatttttattaatttgattttctttgaaataatattttcatgatgtaaattaaaatacttaatctgtgctaagatatgcattcctttgcaattgtgtataatgataaaatagaagggaatctgtggtatccttattcatttgagtcataatgagcttgtattaagttgatgacttatcaacttaggcagaaaaacagatctctcctaacgttttccttaactaaatcttttatgtcataaaagttctgtgctatcttaagaaaaatgtaaaggtgaggggaaaaaagtgggctggaagagatggtaattccatgtttttcaatttaaagccttacatttttcccaagaatcagttwttcttcttatgttaaaatatcagggttgtgttttgcatttaatggttatgatgaataaccaacttcaatagtattaaatgtaatggaataagatacacacctcaacatgtacattaaggatttaaaatacttagtaaaaataaattttgtttacattactagcactcagaaaacattgttattaatatataatttcatattaattgttttaaagtcatttgaaaaagaatgcatggggagactggtgtaaacatgtgcaaatcacagtgccaggcttgcagcaattactcaaacttttgttgcctgtttactgaatgacttttagggttctgaactaatcaaccaatcaatgggaatttcagagaattatgtttccaatatgaaaatgagaagaccttctttttaaccataattgatatagaatgttaaggccattttaatgactggacagttatggttttattattattatttattattattactgagattaataaaggtatcatgttagttctagaagatcattcttattatactaaagtttatctaaggaaatgactatttggagaaaatttttttgatatctacttctatataagcaacagaatttggcttataattaatttatttaaaagttgctcagatttatcatggataatatcatggatataataacaatattatatattatcatggataatatatatcaataataatatcatggataataaaacctggtggagacgacagagcctaggtaaaaattatgacacatggggcaactccctgtctacgaatgatctggggacaatttctttgtttttctgaccctcaatttttcatctataaaatgtgggataggtacagatgatttccatgatactttccagttcttatagtctattctattttaaaccacagaatatatttcataaatataaagaaacctaaatacccattgtataattatctcacacaacgaatgagatgaaagtaataggataagctgtcagaactaatttcaaattatagcaataaggttaccaaaccttaactgtggaattctacatgctgactactccttttgaatccttttaccaagtaatgaaaaagcaaaaaagtagatgtaaaatccagtgaaaatgaatagtatgcataattatttaggatcaacaatatcttcaactggaatacatttgcatatgtaaattttattttgtttgtgttaaaatttcttgaaacaatgaaactcaggtagtacacatgcataaaatgctaaaattattttatagtttgaaatacaatttagtgctaactttgagtaaccctaaagccaattttgtaaaccatctcctctaacaccaattctatagcacaaaagaaaaaaaaaggaagtcgccctatattgttataaattagaatgtcacaataccagtgtactaaaaagacaagatacacatcatgtaaataatttttacttctataaactttttaataggctgtatatatggtatactttcttgatatcgttaattatcctggaaagggaaactttcatcagaatcctttaagtaaaccctaaaactgtcgtaaggttatgtggctatcttattggagaaggagtcagtaagatttctccaaagttaaaaagaggataagccactcttttttttctataggaagtccttaggtacagagggaaatgctacaatgaagaatatatggagaataacatgttagaagaaaattctgatagccatttcctattatttgaagggtagccttactataataattttaagagtgaatgtccaattgtgctaattgacacatgtgaagttgaagctgctatattaggaaatctaggttcaaaaaatgctcagaatttgtttaaaataacaagaatggaaacttgaaattatgacatttgaagattgtttacattcctcaatcattaattgaatgaatggacaaataaatgaatgaaagaatgtttccttcctattttcattaaaatgagagaaaaaggtaattggattgtctactagaatgaaatgcagcaggattctgattaaagatcagaatcaaactcagaatttcattttcaatgttttgatgccttaaattttttcaacaggttgtcatgtcaatcacctttctttggaggtcttttaagttagtatagattttagtgtcttggaagataaaattttacatgaaaagtaatatgccagctatgcaaaatataattattcttctggttaccaaaagaaagtccccaatcttttctcatgacttttttttgaatgactgacctgagaatgtcaataggcttcagaggactactcacttcaccagcagaagcaatgcttccacacaggaatgtggttttttaagatactagtaaatatggmttggagctagcaggagaagtaaaatatctagatgtataattctgcttccacaatgttttgggctcgggtagatggttggagggcatggagaaagaaaagggagtggtgggcaagtggatgtgactgctcatgtctcataactttagggaattttaaaaaattacttaagctatcctggattgtgaggttgtcacttactttagtcttaccttaattactgtgttgttttgtaaaatattttaagtttagattagaatgaatatattacagaaagagtgcatcaaggaacccaacggaaataagacttgtattagtagacatataaataagaactatgaagatgggggaattcatgagaggccaagagatactggaccacatttctgactcttgaggggacagaagctgctactagagaactggtcataaggattgtgtactactgttacccaggaggcagaaagtctctcccctttacttatctctctggtggcttcacatttagcctaacagtgggtttccaggtgatgaaactagtatctaaccttaactaataataagaatactaaaagcataaaatgtccctccaaagtacacattcaaaatgaagtaaatattcattttctctgcagaagaagaagagcattgagaacatcataaaagggtgaaatgaatggtcgatacttccacttttgttgtcagaactctccccatggggacaagatcagagggtgaatttagattactgctgcaccaggcagtccaacagcagacagaggctatcattctgcacctgacagaaataacactgctctttaagctgartattgaggtgccgagtgagagaaagcagcagtgcactgggcactcagtgaccgccttgagagacagatgtggaagacagaatccaatccctcaggataattttcatgcttttggtatccaattactaaaaagttgtgctcttcccaataatagtcaatatcatctactccttttaagaatttcttgtcataaattgcctcacttgattataatgaagcactgttagttccatagcaagaaaagggttagccattctgaaaactggccaatgatttggcaatattctcttttggactgttagactgtgatgggatatggcctaacaattggcaaaaggcaaataaacacagcgttgctgaatttgactttggctacaaaaccttcagcgactcatttgtcaacaattctttggataggctcctacttaacaataatgtgttagaagctagcaaatacacatattgcctctgaatatggagatggtaaatttgcttatattctaaacagttcttagcaagttatctaaaagaacaataattcacattatcagaatcaaaaatagcaatgtaaggacaacccctgcctttaaaaaaatagataataagtaacatatctacgcagtcgaaccaaaatcctagcaattatagacaaggtagaatcttgtagaactggtgacccgcattcccttaagtaacttgttagggctttaaattatgaagaatggataaactgctggggagcagatttgaaaatattagccattctttgattagtttttaattttataatcttttctttttggctatcacatgtgcctggcacttatgaagtgctaataagttcattcattgccacgagtgcatctcttatcatctcttttctcttttgtaaatcctcatctagactgacccttatgactcagctgtacaataactctttaacctacagttctagagcattcagaggcccaagtgaattacagagaatggaagaagtcagctcttagatatattgaaagggttgcctttctacatttttctatctctcaaccttgtctaaatattacaatcagctggggaactttaaaaaaatactgatgccagkttccacccacaaaaaatttttcattaaattgatctgaggtacagtctgggcatcaggaattttaaaagcttccccagataattctgacatgctgccagggatgagaaccactggactaaggggatcacattagattactggggaattaagtcagaatctcacaaaggtgggaaggaccaggcattagtatttgttaaagttctccaatgattctaaagtgcagctaaggttgcaaaccactgcttatggagaacaagaattctaattcagcctggaccacctcaggggtcttgggaatgtttcagaccctgtagagggattcaaagttaacttgaaccctagaggattttgaaataggcttgattaggcataaatctctgaattatgcaccaagagggttcttctgggctcatctgacctctctgacaaatcttagtggctccaacatttggtgaactggcctggaaatgtacgtgatgatagctctgtagctactatgttaagaagactgctttggtgaatgagttagctgcagggaagaataggttctgtaccacagcctcacaatgacaggcaggtctgcatctcttctgacactttaaagtggtgttgcagtagggtacttgaagtacaggcctcaatgtctgcttattctgcacttaaatgagccaccttatgactatgaactcagatgctcccagattaggatctcacctctcatggccacacaaccaagttcaaaggcagaggtttaaggagacaacctctagcctaggaaacccagggggagagaaccacaattctagagggttggcttagtctgctttgtgttgatataagagaatactgcagattggataatttataaagaaaagaaatttattcttcacagttctggaggctgggaagtccaatatcaaggtaatggcatctagcaagggcctgcttgctgtgtcattccatggtggaaggtagaagggcaagaatgtatgagagtaagagagtatgagacagacagggctgaaatcattttttctaacaacccattctcttcataactcacttctgagaaaatgacattaatctattcaggaggttgaagccttcatggcctaatcacctctcaatggtcccatctcttaataccatcacaatggcaattaaatttcaacatgagttttggagaggacattcaaaccatagcaagggtctatccagatcagagaaaagacataaagctagaggactgttctctttttaagactggaatgatgcacaacattagggcaaagctttttttattttctaaggatcatagctttcttcctttgtatcacacaatttttggtagcacaataacttctctaacatcactattggaatacaatacttttccatttttaaattttatatatctcacaataaaattatgtatacttaagtaatatggagaaaaatgactcttgttcaatgaaatagactttaatataaactcctttactaaacaacatctaacatttttacccctcaaataggttgtaaatgaaaatcctctgccttccacatgatttgsaaaattgtgttaaagagtccctgaatgtttaaccgcttttggaccaagttttttatctgcatttgagattatatctggacatatctttagtagagaagtcgtgtcaaattcactaacaaaaatgtcattaaagttccttaactatgtgtatgaaagggtttgtgtagtaatatgtaaagacaaagtgattaagatggggagtgagagaggagaattatccagtacccatgcccaagtaaaccttgtctttaggcaggcaacatcattctcagaggaaaaaaatttgatgtatactggggagaattggctctagagattctccagttgcttaacttccctccagaagaaagtaatctcttctactggagtggtcatgagtacttgatagagtcattagctagtgtccatctaaaaataaagaggaaraaaatatctttgtgaacaggaggaaaaagagcaaaagagaaaaggaaaaagactttacataaaaattattggattttaaatcttctgtaaacttaaaatgaagcaaagtttctcataaaatatagccccactaactttcttgatgcacttaaagaatgagacaatggaatgacaagatagtagaaggaagaaacaaaaccactaaaatgctgggggttggatttaactagaaattgaaataacaatttcagataataatacagaggggttgaaatgataataaattattacaggtattactcaaataggtttgaatctcttggttgattttgtgccgaaaactgtaataatctttgcttatttatcagaattattctgaaactgaatttatttttaagattaatgtaagagaaataagacatgtttcaatatcctcaaatatcacatttgttatattctattgtaatatttcccattttatctggctacttgaactttagatgtaactgtaagtaatgctaagaaaatagtttgagaccaaattcagaatgaactcagcttgcagaattttcttaaggtaatatttccaaactgtgtttctttataacactagtgccccctgagatattaaggctgtttcctgtagcacagcttctctaactaacctgctgagaaatattaggttaaataaaattgaacaattttctttcagcagaatttctctgagtctatactatactaatgagaatttttaaaactctaggaaaagagtatacatgatttcttaaacttatttgacaacataacactcctcctctccctcacctccattcttagtccctggtttgggtggaatatttaaattttattaaatttcaacttgagagctattgtctaaggatctatctttggtgttgtcaagaactaaacgaagttgccactaaattgtttgaatcaaataaaaaaactatacaattgacctgaaccaacattttaataatgaccaactaagcatgtatgccaaagtcagaagattatatatgatttcggactattagagtaatattttgtgcatgaatactggacagaaatccagggatttgcagtgggatttaagcctaatttaaaattctttctgagttctgagcagatttataggaccaccctcctgtaacaagaaatgatgcccaacagctattatttgggccaccgataaactaaccaaaaacatttcctatgctataacctaaaaatgctttaggatcctaatatgattgaaaaattcttactgtatatatctaaaacaataaatttttacttttcgaaaaagtagttggagcaaaatttgttgctatttcaattatttcaataaagaaatgtttcatttactggctaaaaattatttagaaatttaacataatctgatgaaaggactacaaatttaatgaattaatctccacattcttcaaagaaatcaattatttgagattttcaatacagagccagtaatggtcttattctctttctgtgccccaattgcttttctacctgtgtacagcacatctgccttgtcttatgattctttctgtttgcatttggcactgtcactagaatgtcagttctgagaaaataagtaccatatcttactttttattttttttaatcttccagtggtagaagcagcagcacttagcccagtgtaagaggtgaaagggtaaaagaggggagaaagattagtgatcactcaatatatttatcctttaatttattacacatttaaaattagatgtaaataagaaatagattactaaattatcatgaaaatttaaagtgggcaagaattaaaagccttgctgaaataaaagagaaatacacctcacttccctctcattctctatcactaaaaaaaaatggcctccagaaccaatttgatttaatgtctttctaggtgatttcaaggaactggtggaaaatttggtttattgtagaggccaactatataagcagacacagttaccactggtgacactggaaggttgattggcagggcatagtgaagaccaattctagaggagctgtggccctccatgacacccatttttgttcccacctgactgccagctaatccatgcatgccaaaaactataaacagaaaaaaacagtaattcatagttgatattggtttaaggaatatctgcattagagacaaaaagagaaaaagtctttaataattaaatgagctatactagaaaacaagcagtggactgataattttggggcaggggtctgcctactaatattgatcctggagttggtgatcagcactgaagggaggagagggcatatgcataggaagagagaactggggagaagtcaagaaagttggtgaatccactctcaattcgttttagtgccagtagcctgatcttcaggagtcttttggtatcttacggggtctctaactgtacttctgaccataggcctagtttatctggttcatattgaggcagctctcataggaaggtcacttgtaggtgttacatagtttcckcctttgtttgcatgaataatgaagatatgcaaaattttaaaggttaatgacttttttttttaattaattcaaccaagttatttatacctccttttgctagactaagaatgcaatagtaagcaaatatacagtccatgcttttacagaattaacagttgggagtcaagggagaactccaagtcagagtgagtaagtttagggcacatcgcaggttgtcaaacccaacacaaggagaagggcatggaaatcttttctgagaggaaatagcctgaaggatgaaaggacaaaagatagaggacagatgtattatcctcagaggaaatgctttttgtagatgtttggtagtaacagtactgcaagattgggaaatgaaaagtgatttaacatctttccaagtatcaatgctaaactcaccaaggtaaaggttttttttctattaaaaatataagaacatttactctttattaatttgcatgcttcgaatgattgctatgtttattaaaaacataactaccagcaacttaaattaaatctaaaaacatagactgtgaatttgttcactgtgtatgctcaatctggcaagggaaaacatcaataattaataaaaaactaattaataattaattaataaaaaagagaaccaatttctcaaagttcatacaatgtttttcctttaaagggaaattttaaaggcataattcaattggaataatatattttttctgaataactgcatatttttcacttttttatgataaacagtatgttgtgtgtattttacaacaataaaaatacattcatacaaaacagtaatgttcatttcgaacacatacaaaatrgtatacattaaaattgttgtgtatgaagtgagaggggggtacatggggaaaaggcataagtgtgaaaaaaatgaatgaaatattttttactttttaatgccttttcaatctttgaccataagtgtaacttacctatgtcagctgttgacaaataatcactgtaaaatcgaagtaatctttatggagttttttccctaacagtttctaaaatgtgagaaaaataattttgagtcatatgtttggcatgtaaggacaaaattatgaaggttatctaccacattctttaagataagacatacttttactaccatgagcactggatcacctgtttcaactatgtaatcaagacactcagtagtcaagcagctgtgcatagttttatgccctctaattcatgaagtatgctactttcataaaactactgatatgtctttgtttttgcaaaattaggctcacctcccttcttgtataaataatgtgttataaaataatgttggatgtttaacaggcacacagaagtgctttcagctttgaaaagattctggccaaatttggtcttcaaattttctcttaactggctggaagatggccagatattgaataataatagataccccaaagaagatgagcataaatctatatcatagttgctatgttgtaatttaaaatttatgatgttttgaagtactatttagtagtttattagatattcaaattaatattaccactaaaatcactgcactgtatagaagtaaatctgttactgttgccataaatcttttaatttagtctgcaaaatcttacaatgtacaactgggaacatttttattgagtgaataaatgtaagtatataattaatgttaattctttaaaaatacatatgccaatattgaaattggtacagagtactttattccattctgattaattctcaaaatatctccatgctgtaagcttgcaattacacagttacttcatttcacggaagaaaaaaaagaccctcaggaaactggccagcttaataagtttgctggtatataaattctaactgttttaaaattatacatgggcctgttttacttcctatttagatgttgttcattttagtgaagaaagattggtgttcaaaattagccagtgtttcagatgatcctatcaaaaacctttgcatacaatgttgattgttttctgaaaatatttgagtagtcagttaacttacaaagattagatattgcatagtaggtctgatgagtccattgtgtgattaacatcattgtatrttaaggagcaagaagttcatatatagaatcttgctttaaaccttccagctttccttttatcaacacaagctggttactaaaagactgtgtagaggaaaaatgagacattcttaagtaaattttttccctcaatgaaaacatgggccattagtattaagataacaaaaatgactactacaacaaaaattaaatgtgtgagtggtttctrtgtgcctggcactgtgttaaacactttatatacattatttaatttaatcttcacagggctcttattaggtgggcagacttatgctcatttgcagatgggggagatttggctcacagaattaagtaacttgctctaggttacatagctagtaactgtcaaagttgggatrtgaatgcaagtaggtttaactccaaagcacagctttagtatcatcacatgtatcactatactgtcactggtgttattaaaacatcgcatattactttgtatcaagcagtgggataatttgcatctgaagaaatacaaataactgaagttttcttctctgtaatatgacctaatgaatacttggcattatcttcagcttattaaataaaaacttactccaagtttccttgtacaaaatatatccatctgtcttcccctgagaaggcgtagcaaccttcagtttattttgcttacacattgctaagatgctacaaaatttaacttggttgtattttaaacacattcctgacatttattaaaactatttatacttctgttctttagggtctggaaaattgttatagaatgcataataataattatccagacactacatatattatatattaaattgtatatatacagtttaatttcagataatctcagataacttagtcatatttaggaatgcctaaagataatttccttccctaaagccactaaatccaaatacaaagcaacacaaaaacaaataaaagaaacagcagagagtttgttttaacaagcatgtctgaaggatggtgaaaaagaaacagtttactggcaaataggttctttcttttgtccatgtccttagtttatttttaatccttttaggactgcgctccacaaaaagtaagaggcaaaagaaagggaataaaaatgatgaattaatccaaagatagtatatctggaattctattttaaggatttttttggggtgtgattctgggtaaatcatatctctgtttctcaatatttttctgaaaaccagacatgcattatttgtgacctgattaactttaggttctttcagtgtcttaagaatatcttagaaggtttgtattctgaaagttgcagtggctctttccagcaattagaatactatttattgcaatatttactgagcatatattacrtattatgtactgtgtatgcacagatacacaatgcaagcacccaccattgaaaaaattcagcctatgtgtggataccaacaccaaagagtcaatttcagtagaatatagtaagtactgtgaaaaaggtatgttcagggagttagaggactctagtggaggccagctaacagaacctgggagagaaagggcaatactctcaaaaaacatattttaaccacatctcaaagagcmrgtgggagtgaatcaggctagagaagagggtaggaaatggggaagggagtcagaagaaagggtatctcttcctggaaaatagtacatgaagaaaaagctgagttgtgtgtcagtaggtttgtatgggaattagtgtttcaggagtaccaagttcaagataggaagtaggaagagataagactgcagggaagtctcatatcttggaaagttgttttagggaatatgaagctttacccataggctataaggagccattgaagaatagtagaagcactaactaatcaaaaacagtcatttacattattcacaaaaatgacctggatagttaatatcaattaataactcaaatattactttgttaaaaatttaacctttcttaccaaatcctcttaccagaactacccacaaagcaatgaaattaactcgtgacaatgaatatccattgctttgttccacccagtctttgatacagggatttataaatggaccagattgtcaattgcagaagagaaaagggagaaaagtaggctagaaaattcaccaaagagttatcagtcttagcttatcacaccaatagcattattttgtataaatattaatacacattatatatagcataggagtagattgagttgataagaaagtgagagggagcacgaggacaaggaaataatactgtatcatatattatggaacctgggtgttaatcctttttcttccaataattaactgaatgaccttgggcaaatagttgactmtcctaggcctcagtttttgtttttgtatttgttttataaatataaattgaagagaggtaggccagatttcttgaatagattacagttgttaaatgttaccaatagtgctaagcaactgagagagagagtgggtggtaaggtgagagaaggaaagataagagagagggagaaaaaagagagagaaaaagagagagagagaaaattagttatctattgttgcataacaagttacctaaaatttaccagcttaaaacagtatttattatcttgcagtttcagagggtcaggaatttgggagtagcttagctgagtgggttggtcttagggactcttacgaggttgcaatcaaactgtcagctagggctgaagtcttcttatgtcttgactggggctgaaggatctatataaagcattctcacattgttgttggcaggcctctgtttctatcaggctgttggccggcaacttcctctttgctatgtgggcctctcgacaggcttcctgagtgtccttataacatggcaactggcctccttcagactgagcaatgagaggggtaggagagagagagagagagggagggagaaagagagagagaaagggaggcagagagagagagaatctttaagatggaaattgcagtgtgacgtaccatcatttctgccttattttattggtcacacagactaaccctagtaaaatagtaaaacgtggggggagggaactacccaagggtgtgaatagtgaatactaagtgttagggatcattggggccaaaccacggactaactaccatgcatggtttttgcatctgaagaatttttagtcaagttgaaattctaagtacacataaaattaagttaaagcaacaatagaagagaaacagagcaataagtttgtggaataagcttgtttctgaacaagcctgagaagtagatagctttccttattggaactgctaatctgggttagggtctcctcaggaggaacgtggctctcttctcttactgcagacagagggaggaaaccttataccatgtgttaataccccacttcgtagcattgagaaagaaactggatgatttgcttgcttaaaatcacactaatggttgtatgaaacaaagacaactccactctggaattacaggtctggaaggaagccatgagatcatagagtccagagattttgacatgaagtttgcagatagccctcagggaaactggaaaggaaaaaatatgcacaaatattggggacaggattcaaagcgtttatcacattatcaaaagtatctgtgtttccaataaaagtttaagaagcactgatctagtctattatgcttattttatttgatgagggaactgagtcacgaaaagataacttttcaaaatgacatcacgaattagtggcagtggtggtttggactggaattgaagtcttctggtttttagttcagcatacttttagttaaacccactgtgtaaacaatatgcattattactgtggtttgtaacaccaaaagcttagctgatttccttctgtttatacactcttacaatttggatcatttccccttttgttctcccaccaaatgtcaaaaagttgatatatttcttataagtaaaagagtcatcatagaggggtagaatattgctccaaagtatttatagtgaaaagccaatgtttatatatataggaaaaagagatcagcaaattgattatagttggccatctataatataaaaccaaatacttaattgaaactgaaattgaaactacttaatgtcctatttacataaaattatctaaaatgaacatattgttgtacagtcatacagctaaaataaaattaaccaaattaatgcattaatatttattaaacagatgggagaataaaaacttctctttattgggtattaactatttgtcaggcacagtgcttggtgctttacatgatttctctcatctaattccattttataaatgaggaaaatgaggctcagtttgacagtcagagactggtttggttctagtaaacaacagagtcaggacctgaactcagggctctmcagaaatgaaaagccaatgctctttccacccattgagttgttttgttatataacattctgaagttgattactgaggtattattaaacattctaatattttaacattttaagttttctatcaagatgatactggttataagttggtttagatggaaaaaactgtaacaagaaaactcaacctgcttactgcttagagattcattctttttggcttaatgttttatctttcaaagtgtaaattaccaccaaaacataacacttaaatacttatgaatagcttacaactttaaaatgaatgagtaaataagataatttcctgaatgtgggatttgattgggtagaacacagagaacatgagattaccttaaaaggagaagagaatacagaagtggaagagactgcagaaggaggtcagaggcctcaccaaacaatactgccaatgttgcctgggtgcccacaacttagattttcaaattaaacactcaattcatacttatttagcatcaatttaagtctgcagtgttataggctcattaggggatacaatgattagaaagcataacatatgtcttggattcagcccctaagaatccaattttagaaataaaactaatatcaacacaagatgaagtaaaataaaaataaaattagagagacattaaatgctaaatcatatggtattggccacagttccaacaggagctccagaggactgaagtagaccaggaaagtagaccaggaagcattacagacaaagtgggacayaaagattagttaggatttccatatatagagagaaaaggagagtgcatttcatgacatggtataattttcttctgattcaccacagcagtacttctcaggggctccacatcatttcatatgttcagcctctcaaataacaatgataatgattataatactattttattttattcataattcttattctttattacacattttcataattattattcttaatagcagtattgtgtaaagtttttaaagaaaatgtattatctcattgaattcctatcagtcacatgactaattgcatacagtgtttctcagtggtcagtaggaggagggagcaaccttctcattgtacttatgcatttatttttatcattttgtgtagtgctcaagtattataattatttgtatatgtctgtctggctagagctccttgagggcggggaacttttctttttcatctttttatcaaaagatccattatagtgtccagcacattaggaaataatgtgttcaagtaattgaattaagtaagaagcaataaaaacttcagtgaataaaggtattgtaaggcttctctcagctcatcattaagaaactctatcatttggctcttttttttcttttaccttattttctactgtttgctaatggaaagattctattctagccagccaatctattcactatttttcctagactataaacatccatactttttcactctgcatgacaatattgactagaatttttcttctcagtatctacccattcttcagggcccagattaagtctcaactctccacgaagctccccttggccatttcagtccacccctgcacactgctgagtaccttgtgagagtaaaatgtgagaactgtaaaacagtatacaaayataaggcattactgttatgattttctccttagattactgtattctcctagactttagaaccaggagttggaagtattataggtctttccatctattatattacctcttttccaattcccttgtcactctctcccctttccttatccctcactcccatctcagcattagaatagtgctttgcatagagtagttactcactaattacatgratgcagtgtcttttattgttgcctgccattataaagctgcaggtaaaggaaatctactagcatggttatttaaacatttgacagaaaaagctcagttctaatttgttactatttacactagacacttcaaatacccaaccactggcttttcttctttttaattccgtttgtgcttccacacgacacctatatacctactaagtcactacaattcaccaaatatgtgctgctcacaccactaatgattaggttgattaggaaaaagagaytggaagtgggagagtcaaaggctgttggaaatcatgtgaaggcagaaatagtttctatctcgaactctgctgtattgcatctcacaaaactagcacaattcctggcacatattaagtgtttgaaaatatgtagccaatgaatgtttgaatatatgggattagttataagtagggtgaccatattyggtggtctgctgaagctccttgtactggtccatgagagccaattgttaaattttcaaaaattttgttaacttattaaatacagccattattaaacatttaattacataaacttagaatgaaataaattacattaaaagaaaagtaataaatactcaaaactctttactactgaatttctttactattatatatgtttttgaggttatttctaatgtatttatatgatggaaatactagataatggtatgcgtctgtatatttcttcccaactctgttcagtgatgttttgttggtggcttggacccaactatgataagagcacctacaccacataaattggccaatgctacaaatcagggcttgattyactattttgttgatggtctacatttaagcgaatgatacaaaaatgttaataatgtagattaaacttaaggtttagtgtctataactgtttcattgtgaatagaacaaaaatgagaaaatagttttctagtatctctaaaaactatgatctaattcagcaaagaagtcactcatatcattgagaagtgagtgaagttccaatatacatcttcattcatttaccttcttcttacttattaacataaatgaaaacatcaacaaatattattgtcagaactatagttgttcctctattacaaccatggtttggcttcagagaaaaacagaaatagtgaaagcattttgtgagtattatattttattatttatatgcttgtgtgctatgcttcctttatatcagtagaatttgtaatgaactatgtgtgcatatatatgtacactttttttccctgagagtcagttgttaaacatttacatcatgcttctacatataatctatcatccaaactggaacacttttgagagtaaaagattgtgctgtaaataaacacatcagaatagcaggtgtaaactaacattgtgctgggcaaacaaggatgcaaggtcacctttcttataaggatcttacggcagtgttggaagcaatgctggggtaggcagtggcattgctgggatagcagaaaactcatcaatgagaaccatatgtactatttaatttttcattatagtatccattctccctcataaggatttatgattgctctcaagacaatgaaaaaacggagaatggaaggccacaatccagctatttagcccagtgtttcttctttttaacattttaacatttcagtaaaacatgctactatgaaaagatttgaaaatgcacggaaccaaagttggtttaaacagtaacagattatgttttatagtatgaaaaagtaaaaaagaatatagatgatcacatatttgcctttaaaaacwtttttaggataaaaagtaagtagacaaagaaataacattgaaattatctgcttcaaaacatcaatagattgtagtacgtgggtctaattacattcagttaaaacgctatgtgtgtgagagaacataaggtttatctcaagctgaaataacttggtatctaatgaagcctaatgaagcagatctaagttgaatcaggaaccttcttagcctaatattctgctgctgactgcagaccaaggaccctttgtgcatatgttccgkggtctgtctcaaaggctagaaataaattgcaaatatctccagctttttaaatactctgcatgaatctatcattcaagaatcaatttaagccatcttgaatcaatgtttttgtgatatactttgagctaaaaaaataaatttacaacctaatgcataaagtttagcctctctttttttgtttttatcacatctcagaatactggtaattagaagctttgtgtgtaaacttaaataaaatactttagaacaaatattcatgtattcatattcattctgattcatattcatatattcatatatgaattcatattcatttggttaaagtcctaattattatatagatttcagacatatcctcaataatccttttctttccagactaaaatttcataatttaaaatggttggtgttttttcaacttttattttagattcagggagtacatgtgtaggtttgttacttgggtatattgtgtgatgctaaagtttggggtatgtatgatcccattacccaggtactgagcatagtacccaatagttaagttttcaacccttgcctacatctctacctcctgctagtagttcccagtttgtattgttgccatttttaagtccatgagtattcaatgtttagctcttacttataagtgaaaacatgcagtatttggttttctgttcctgtggcaaacttatttttatcatgctaaattttcctctctagacatttttcccacttgaaatgtaagttttctattgttttttctttagaacatttttatctaaaacaaacggaccttttgcttaagctgttttatattttgttaattttctcctagtttggttcagataaatgtctagatcacggacatactaattaccctgctctgatcactatacactgtatatatgaaaacatcactgtgtacaccataaatatgtacaattattatgtcaattgaaagaaaaaaataaaatatagaaaagtatatgatccatcaagttcagatgataatagctgtccagtttttaaaaactgcaggtatctgtttaaagtcctgctcatgttagccaagaaataatagtaaaagagtgtatttgaaactctcttatcaccagattccaattatcagataatttcaaactaaaatttagtatgatcatttgaaattagatagaaagtttactagacaaacatatctatactatcattaataacttcttgttaaaaatgcccaagtatcagacttccccatctacattataattttatataaattcatgaattttttccttactggaatagacatatttacaatgttagttttcttgtacattaaaactatggtgtatttctaaataacaatgttttattaaataattcactaccttttaagtaaagatgaagtaattagtgtattataattgggagtaggctgacaacaattttcattgaggaaggcttcactcactgataaatatgggaacacttttttctttttaagttaagagccactcatcttagaaaatcttaactgaatgttacatggaatcaaagggcaattagatctagttcattaagatttaaattagtgcagttcaattcagtactcatagagcaccttcgatgtacaggtgasattgtgtaataatggatacaaagataaacaatgtgacttttacccttaatgtactgccataggaaataatttggtaagttacgatagttgctagtaagtttcatatgaacaaaggagtgataaggagactgaaagagaatatttctgggtgcacctaaggaggtaaagaactgggaaaggaaaatttcctggtaaaggtgcatttgcttgaaggaaggattggttggaggatttcatagagggtaaagagcttttttaaagaagagaacaaaatgtgaaaaaaaggtgcagatgcattaggacaacagtgaggaatggggatctctgtcctgtctagctggagaatatgatgcaaagaaagtggtaacacagacctagtgaacagataaaatgcttcaaaacatattttaacttcatattataaaaagagaagatagcacaaaacaaggataaatgggagagacagaattaaaggaaggatgttaggaagtaaatggagaaagayacaagcagggggagaagtgaggaaggagtgctcactaaagagaaggaaaagcaatacacagatatatcaagaaatcaggagagataaaaggcagagaaatactccagaagttctgaagtttctagagattttgacaggtataaccagaacactcactggaatttgggggtgcgggaactcatcctgaataaatggactgtgattctactaacattaccctaaacactgaataaaatcatgttaaaggtcaaatatgcaagcctgtggtttcctacactgatataaggctttcaaaamgtattycttgtaataataatttaggtggacaaagtgttattatataatccaccaggcccattgtaaataatcttgcactatawtgktatttcttttgatacttgtaagagcttgagaatattaamtaagaaactctgtaacatggctggcaaaatactctcttatcactttgaactttacttagaggtaaatacattttgagcttctgtgaggttaagaagaagtaagcaaagatcacagagctagttagtgatagagtcagatttggaacatatgtttctagatacccagatgtgcattacaagagtcaaatatggcagctagtatagaaatcatgctagaataagagattctcaatcttaatgtgatttaattactaagtcttggtagcatatgcgttgatgtattgtttgtcaggtttaaaatacatgttcaccatcagtggtgtatttgcttggggtgaattttctggtaaatttatgcaaattgatagatttcaaagctatctccttcattactgaagaagatgatttgggtaaaacatgcaatcaattcatggataattgttaatacttgagaaaatttttatgtggaatgactttgtcctcattactgcttgctccaaactaattcaactaactggtcaccaacatgatggagaaaacatgaaaacataaaatccaagattcacagaacgagaatgaattgaataaacaataggtttgacttttgtttttcatgccaattaatataaggtagaggtagaatcctcaggctcgtgtcctttaaagatctagcttttacttctgcaaccagagaagaacttcatcattcaaaagctgctccagatatcttttgatttgagagtttgaaattattttaatgtccgagagcatatacagatttataatcagtaaataacaaacttatcagaacttcaaaagacagaaatatgaagcmacatattatgctcctatttacataacatatttgagggccagatgaatgagggttatctcaggatatctatcataaattactagaactttcttttcaaccttctccctaacatttcactattgttgtccccccaactcttctgttttttctacatctccttccaaatttgtcttctttcctgttaccttttctccctcttttcttttccttattcttttttctcttcccttctctcctttctttccatttaactcttttaattccttttctccatttctttgctttaactaaccacaatatagaactgatgtgtatattaattgttcattaaagtgactgggtaaattccttgtgcttaaatttaaaaagcaattttaaaagagtatatttattgttttaaaaaactcctaacataagttaatcaaaattcacagaaaaatgattaaaaataaatatactagattacaatagttatatttctggttattctcttcactttttttcagtgatttccaaatattctttgatgagcatatactattttttgatgaacatccacatatgtacatatatatatatataataaactatgttgcttttaatacatgtggctgtcaatttcctctcagtcacactctgataagataaggaaggctcccccaaatacccagtagtctaagcaacccaagacagataactggcaaaacttttcttgaagctctccaagaatgaaccctctacaattttctttagcagtcgattccaatattatattaccctaacaactggatactttctcatatctagggaaattactcctgcttcagtttaagcccctttcctcatgctcttttttttgcatatgaataatatggatatgccactaaaaaaaacactttcataggagaaataacattcttttctgtctgcactcatccccttgataagtaatttttggctatttcaaatgctggtctggcttacagataggaattcaaacagagacttgaatgataccttcagtctgtagagaactgctcactctagcactatctcagactgcattactaagtctaagtttttcttgttacctaatttccacctgcataggctcatattgggctcctagtatttattgctagttatttttatatggaataaagcaatcatgaaatcaatctaaaataagaccacaaatcagtaaatgttttttacttctatacctacaaattgtcctctataggacagtgattttagtatataaagacagttatatttctatttaatcttatcttctctaggctaagcaatgtaaattcactcaaccattacacttaaacatgatttctcagattttcaccacccaccagtcctctaagaataccacctaaaataggatacccagaatgcaatgctccaaattgcacagggtggggccagaatcagcaagattactgcctccttggcaaccttatacttctattaaggcagccaaggttgccttcccattaatatagtttaaggcaaatatgccatactgtcggctcatcttaagcttgtccaggtccctttcagatgaattgctgccaagttaggtctctttcgcttctatacttgtgcaattgctttttgtatttacagtgccttgcttttctctttcttaaattttgttagcttcatcccaatatcatagtcaattataaataaagatacatgtaaacgagatcagatatccataaagattacttaactttagagatactgtcatcctgtgaattctaatgttaaaatttytgagttggaaaacaggtttttagaaatgtatggagggaacactccacagacatatgcaaagaaaatgtcatgctcaatcacaaactagactgtgatgcgccattcatacaaatgtggttgcatgagcccgtaaggaatggatcagcaatgcatgtgccaaagttgtataaatccataagactgagaagaaacaaattaaaacggagttgtggaataaacatgccttcttacagggaaattcactataaagaaatttgcaataatggaattagaatggcagaagagtgaatttagtttctatatcaagactcaagtgacagaagaataacaattgaacaactgatgaagtgtgttcatttccctcctcatcatcttttagcagtttcctgtcaatacaagataactctttcttccaaatcttggaatttttattgtgttcctgactgtctagagttcatttctctggcctatgtcactgattatgttgctaaagatattttttttcccttatactgacccttcaaaaccatcctgaatgccattttttaagcccctcctcttagccagctacaccattagagagccattttataaactgacattattaatggttaatagctcaatgtgtaaactttctcagaaatatttactctttagttatgtgcccctgaaaatatgatgcttaatgtagagcaactagtttccagtggtacaattcaagggctgcagccagcaagagtctggataagaaagacatttcagagaacaaaaacttccttatgcctcttgattcccacatcacaggttttcaattacattcttgatctttaaatccagtttaacaaaactaataacactgcgtttgttatgatagttcatttaaaaataaacctcatctgttttactgtaaaatctgttacaggcaattggatagcttaggttttttgtctgaagctgcccagttattcttttccrcatgtgggctgaacctatttgggaaaaaaactaaactagagatatagttagtatagctacagctaatcaactcctttgaatgctccttcccccaaaaatatatttccctggtcagtgccatctgtatgtgtgtgagtggggaaatatatgtctaaaaactggtttttttttaaatgacagtttaattcaatcaaaattttaagtcagatataatcccatgacctagaaaaagtatatcaaaaaccaatttcctttagggtttatatgtatttgtttccaaaatattaactaagaatatggatacttacatataaaataaataatacggtcatttaaaattttaaccaattagagcttgccaatttctacagaaagtgtgacaactacatatattgcatatcatagaggctaaggttttgtgagagaagaaattataaaaactaaaaaagttttattaggcacaaaattagtatcataatgataaagtattttttcttctgtaaagtgttgaatagtatatatttttaagcaacattcaaaattacagagaagtctatgcattgctgacagacatatatgtatatatgtttgcttaaatctatatgtatatatagattataacatcaacaatgagattaaattctgaaatctcaactttactaaaattttagtatttatatttttttctaaatcttcttagaattcctcttcaattcacctttaaatgtactgactacacattcattgaccttgataatttcagtaaacatgaagtgaaacacagcacaagccaaactgaactctaatttttatgtacgtctcaaatcatgaaacatgtcttctaaatttgaagcctttattggggattaatactcctaaattttatttagaatcacttgttaagtaagttttaaaagtaatacttatatagcaatcaagagcggtcaagtaaatcttttacctaggaggaaaaaactaagacccactttgtaatctcttaggaattattttacatgcggttcttccagtaagtccaggatccaggatgctctcagaatttgagagactgtgtttaataactagtgaaaaaatgctatttgagaaactttctctcaatatgatatcttatatcactacttgacatagattcaaaatttgattcaataccaaccagattttttttttttgagatagagtcttgctctgttgcccaggctggagtgcaatggcatggtcttggctcactgcagcctctgccttctaggttcaagcaattctcctgcctcagcttcctgagtatctggcactacaggtgcatgctaccatgcccagctaatttttgtatttttagtacaaatattactggactggggtttcactgtgttggccaggatggtctcgaactcctgacctcaagttatctgcctgccttggcttcccactgttctgggattacaggtgtgagccactgcacccggccccaaccagaattttaaaygccagttaccttactatttcatatttgtgaaaattaaaatgaacccttgttaacatctatttctatacttgctatgggaaaaaatgtttggtaaacaaattaataagtaaaaagctgccagagaaactggatgttattttctggttcttcataaaaagatctatgcagattttttaatgcagttacaagttattattgtttatttaacttaagcaactaaagaaagctcttttggatgcagtctttaggaaatataatgaagataccttagtttgggttcaaatctgagatttgagagaaatcctattatttctgggcaaatgagtcagtctctctgaatcttggtttctttattgggtgactgagatagtatctaatctatgtgcttacaagattattaaaataatgaatactgtatatgtgaatcacagcacagggtgcaggataatataagcactcagcaaacgttagctgttatatgccttgcttactatggtataaacaaaaagatgataaaactaaatttctttgaatattttacatatttcaaagtcaggaatttatcactttaaatttttatcactttaaaaggttttccttccatagggcccaaattcacaaaattactctagttaaaaattgtactgctaatataataatcacttttctcctttctcttaccactgtggaaatgtaatttttataaataatcttargtaatcatcctaaaatattgcattgaggtcaacaaaaagtggtagtagcatgtttggttcccattttatattctctgtaataacaactgtatttttctttttttaaaatttgaatatgttctgtttaatctaatacgtcatttcaacacataatcagtataaaaatatatacatattttcattattattattttttattttaagatgggatttcaccatgttacccaggctggtctcaaatgcctgagctcaagccatttgctcacctccgcctcccaaagtgttgagattacaggcatgcgccaccgtgcctggcccagtataaaaatattaatgagatattttacattctttctttttgtacaggtccttcaaaatccaatgcatgtttttsctttacaacacaccttaattccaactattcacattgcaagggttcagtagccacatgtggcacatggctcttatgcaggacagttcagtgtagaccatgtaaccgtcagggaccatgtgttactctgctcatgacaaccatatttttctgctcatacattccgaggtaattgtatctagactcatgacttcaattatgacccacgtgctgtttaatctgaaatctgaaatttcatgtctcttccttttcttgagctcttgttacatgtatctaatggtcactagatagctctcctgatgacctccaggaaattcaatttcagcacgttcccaattgaattcaggatcttccccctcaatcctgctcttaccttatacattttacataagagttctgatattactcagttgaccaaagtggaagccttrcattcctccatctcttctagctcccatttttaatcaccaagtcctactattctatcacttgaaatgtgatagaacattttaatattctcttaaactgaatcctcaaatctcctaggaagtttatatggctggggaggcagtgtggtgtaatagaaaagatgtgtcagacaggcgtaggtttgaaactctgctttacctctaattaatgtacaacatagatggggcatacttttataaaagaaatacagagtgaatgatttattgaaggttatatagttagcattttatcatcagaaatacagactaaataaattgcactggaatccctgaaatataccatggatttccagaagtttcatagggggcagggcacttgttaggtctctcttgtgcattttcttctcttttccccctttccagtttaattccagaaacacatcatttataaagtaaaggaaaaaacactaatatcatcctaggtaaaaatcctggtaataataagagccaatatttattgagtgcctgctctgtttatagaaaatatttacctatcagcatatcctcaagtaaattcagttctgctgtggaactccctactaatgagaaaacattggttccacttaacttatctgtactttaagactagaagaggtctccaagatctagatattccccataattatactctttatttattttattttttatattatttttttgagacgaagtctcgctctgtcacacaggctggagtgcagtggagcgatctcagctcactgcaacctctgcctcccgaattcaagcgattctcctgcctcagcctctcaagtagctgggattataggcgcgtgccaccatgccccactaaatttttgtatttttagtagacacagggtttcactgtgttagccaggatggtctcgatctcctgacctcgtgatccgctcgcctcggcctcccaaagtgctgggattacaggtgtgagccactggacccagccataatatattcttaaagcactctctgcaggccttcagtctcaccatgttccattagccaattccagggattttagtgaggtgggatggaaaacaggtaccttgcccctaaacagcagtatgatttaaagtgtagttgggggatcacctgtattaggatcacctactttacttgttttaaagcatattctctaggcctcaaccctcmcctattgagtcaaaatctctgctgttaattggcgtctcaggtgatttgtatgcatgcaatgtgacaggcacctcaagtctggtgatattcctgttcacctgtgtgtcaggcattctgctaggtggtgaatacacagtgttaacaaagcggccatggtatccctaatgtatagcgcttatatttgttatgaattcatctagcatgaaaatcaaggtcaatctgtatttatacacagctttcattttaagaatatctacttcatgatgaatactgtgtgcagaaaaatgcataaaaccccagcatttttcaaacaaattgtatgttttcttaagtaataaaattgtagtaaggcaatgttaaaaataatgggcatgataccatacgggtgctcaattgcactactctgaaaaagataagacaaatactctttactgaatttctgggtaggtccatcgtcagttataaaaaagtttttggatttagataaaagtctttaaagaaatatttttaacaatttttaatctaatgtcctatatttctaaacagacatatttttaaatggcagcacttaaataagtgattttggtgttttaaacatcaaatgtatgctattttcttgcttaaagtggagaaaacaaaacgtgctccactttgggtatggtcaatagaagaaatttttcagtttgtctcaagtagcttatcttatcactattgggtattattgaaccatggcttttttcttttttttctttttgtacccagaaatatgctcctcttaatttttcactctagagctccaaatgtgttggaaattactacagaatgggaactatgttgtttaggggagtatcagaaacactctagaagagctttctattgacataaataagaactagctcaacatgctgttacatgctttaatgtgaccgcatattggtgccacttctgccattcactaacttataagacattctaaaatgttaaaagtaagtctagactctgtattataattttgttaaacacatttgattgagatttttttcagtttttttccagatatgctatatttcagaattaattctttagaatttcattttttaccctatttccctctgagacttgaattattaccccagttcccaaaatgtgtttgatgatcataatagaatgctttgtgaaagaagtacaaagtgcagagttctatttagaagttgaaagaaataatggaaagggaaagcagctggacagtgtcttatatgacaagtcatttctgccaattaaaatttcttgacagggttaaggaaggttaatgtaaaatgtaatgctatgtgggtaacatacttgaagtaaaatttctcaaccattatatttccatttattcaataaattcagcatttctactatatgcaagcattcaactggatatatataaaaataagactattcaagaattactttttttcctttgcctttctcttctcaaggaataaatgtttgagaaggagagataactaacatagtaactacaaaataaggcaggataagtgttctttctaaaaagagtcagagatactttattttgtgaatttctgaaaagaaaaaaggggaaaggatcagggaaggaacttgagtctcactttgaaagatgaacagggtattgacaggtgatgggaagtcacaaataaacaaaagatacagagttgtgagaatcagtggcagtccaactttgttgatgaaaaataagaccagaaaaagacaggcaactgtttttactgtgttaagtgcattacaattcaatccaatttaatttttaaaaagataccttcatattatagagaagggaacttagaattgaaaaagttagtcactttgctcaaaatcacagagctagtgagtggatgaatctagatttaaagccatgtctcaaagccagtatcatttttactactacaccaccatgcctgtcaaaataggaagactccataatttacagcaagacgtttgggtttcatttcatgaacagtagagaactactaaaacttttaacagtgttttttctttgggaaagcaggaagcagtttattggattcattggaatcaggagaaagtaggcaaagagagaagagttcgtttaatactataatattccaaatgcggtaacaacggtgttagtaatagaaatggaaaaaaatcaaatcagcgtgtaaactaccctgtaggtggaatccatagaaagyggtaattagatatgggttatgagagataacttttttaaaaagcattcaaatttcaaagctgaatggtttggaaaattatgatgccattaactaaaacaggaaaatcaagaggactgaacttttcagtaaaatataaatacttgagtcactttttcttaaaaatctataacattttatragtaactayattatcaaattccttagagaacagaaacttttctacttccatttctcaagaggaaagaaaacttgagtacagacttgaaaaatgagtctataaaatgagtatgatcttagagcagaatctttgaagtggtcccaggtcccagtgacaatagatttccaatgtctattacttcagtatttagaaaatagatgacaagttttgaggctttatttagtatatttaaaattaaaagaattgattaatacattatattagagaataggaatttttatagtcatcagttaaatggtatacttttggaaagcgttcataatgatataaaaaacaattaaatgaatctaatcatttttgtgctaattttagcacaagttaaacatttaattaatgttagaaaaattaagcctttactgatgttatttatctttcgttaggcatcactttcttgattgataatattttttccccaaaagcacaatattcactttatagcaagattgttgttggggagatcaaatgacataaaacatgtaaaaattctctgaaaacttagtgaaaggtgctgaggtagggcttcagcttgataagatggacaagtgaaggtatttataatcactaacataaattattgatatgagtaggatcttagagcaggaattttgaagtggtcctcaggtaccaatgacaatagattttgaatgtatatttattcatttatactgaattaatatactctggagaaaaagaacccccccacgtgccaaatagtacatttaaatagtcataatccacaaataagctattacttggctttgagtcatctttaaaggtcacttaaactcataaacatgcacgtccagcatagttaacttgtgtttctaattaattctcatttaaaggttttggttttatttggattatttttcatccaagattttcctgttccctctttaccaatttaagattcaacacacttttgcattttaagataatactcactagaagaaactctttaagaacaggatgactaaaaattgctttttaccattgccaagctcttgtctttatagaaatcagagggaactttatgttcccatattttctgactttcatacaaatgggaatctaatacttcagaaaacaaaactcaaaatcaacttcataataatgtttcctaaaagcaataggattagttacagttgtggatatttctgaagttcctaaaatcctgtcttttagaaatttattctataaattcaatttataaacaaaaaataagtcttgcagatgaattcaaagtatttcccccctgcaccagtattttgtctattttttctagactgaccaacatctactactctatttagtaattattttttacgagactagttgataaaaatgaccactgcttataaaaatattgatctgctatccagaacaataaagcaattcrtttgattgtccttcatttctattaaaaaacacacaaaatctactgtcatataactaatactcaactaatatatcttccttctctagtgatataaatacaaacattactgaatatcttctgagtttcccagaaagtttcaaaatgctttgaatctttgtccaggagaaagagtgtgcgtgtatgtttctcacaccacattgtaattgatgtgcagatgtcagctgtcctggccagaggaggagagatttgtacatttgactactttcaaacatggaggagtaggctcccaataggttctctgcattaggtgctttctaggggagcagcacaccatgtgatgcctacaacaaattcaaaaactctcttagaatcagaacacctgtaattagtatgtttattccatgaattttctgaacctcctagtccatgtgttgtacattyttgcagtgctgttttctttcttttcttttttttgagatataagagtgaaaagagattttttaaatgaacctgcatttcagcattgtgttaagtgcttttcttttcccatcctctatctttatcttaattattttaaagtcctcttgttttatctcttcaatattttgcaaatattgcttttatgtaaatttatagagtttgaggaataattaaaactagtatttctatagttctctacactattattttatgctttcaaaaatgactgtacacattttcaggggccaaaaccaggctatagttcatgacataagctgtgcttgagacttgtagctggtggtgtgctggagatggctcatcccggctcctgtgtgcatctctttccaactccacattcatctcttcccaataccatgttggtatcttgacatgggcataaaactggccatggtggaggtatttacacaatgtaaatgggcaaatgccacacattagagacatttcttttcttctggagagtctgttcttaaatatttttatccacccacacactgtctgtagacgaaatttccacagctatcactttcttcccttgacaccacacctcaccactgcctagtttgtctctaccaacaacaaactttatgtttttgttagcactgtgacaacctgtgcaaggaatgtcaagccagagcatcaggtatcatggaagaggcaagccccaagagaggaagaaaagtgatactatttttcctagtacctgccaaagttacttctgaagccttaaaaaaaaagtccaaaaaactcagtgcccctagaagtaggtaagctgcacaattacttacatagtacataagtactgatccacccacagataacaatatgttgagacaaacatatagccatgcttatggaaggtgaagtttgattttagtggaatgacatataatttacttaagtgttttagttgtgtagtgggtgtccatatatgatctctgattccactgcaaagtctgaatgcatgtgctcaaattagctcaaattctaaatctgtggtaccaggattccttttgaaggactatgtttttactacttatattttgacatttcttcacagttcaggcgatcattaccaaatattcgaggtgggagtactggccaatcccaaaaatgttctagcaacagccaagtcagaaaacaaatattttaacccacacacattgtattcattatagtctgaaaaaaataggactcttgataccagtcatgtatataataattaaacaatctaaaacccctctggcacttataaaaactgtgcagcttctttgttttggcaatatgattttctgtccttagcagagacatattagagggcaaagctttgtgtgtgaggcagatatcaaagaagaacattgtttgtttgattatgttttgttttgtctttttcagaatgcatttggtttgtttttaatttttctttcttaaaggaatactgtccaagccaaattccactatgtcaaagctcagtgttgatagctggcatccatgtagaccataaagaatgagtgatattcatcttgtggggccagccttcccctgaaaatactacccttcatcccacctctgccatttttcttagtctatttccttctagtatgtttctccctgacttaaatatctcttccatcctgatgaacttcttcttcctatctgttgaagtcctcctcgactagactagtgacagatcttttctcttccttactactttgccacttagagtcttccttgtcatttgggctaattgcaggtctcattatctcaaaaggcaattagttcctcaaagatagagagctaacaatttattttttgtattccctgtaaaaatccatgcacaatgttagayactgagtaggtatacagtcaataactctgcttcattttatgcagatttgaaaaacattaaatacatattccttggccatcatccaaactataaaaagaggagtggcttatctgacatcatgtctatttttcaatgcagactttagctaatctgagaaactgcatatttcatgctctatacttctcctacttactgctagatgtcttgtctatctctttgaaagagccacgtacttctgtttaatttaggcatatgaagttaatccctgcaaatactggctagaataagttgtacactatgtattcagatagtgcaggtacaatatgtacattctcaaagcatcaaaaagaataagagcaatccttatttttttgaggaaaaatttttatactccattaaaacttaaagagataccatgtgaaattcaagttgaattttcttatgctaattatggtactgatttaatttcaaattaaacaactgcaagctctctatctacatatggttactagggtaacctcatttatctaatacacatagctttaagactgattattgcccaggggcagtggctctgtaatcctagcactttgggaggccgaagcaggcagattacttgaggtaaggagttcgagaccagcctggccaacatggcaaaatcccatctctactaaaaatacaaaaattagtcagaaattgcttgaacctggcaggtggcggttgcagtgagctgagatcgtgccactgtactccagcctgggtgacagagtgagactccatctcaaaaaaaaaattgtatttaaaggcagtatgagagcatggtgaaaggagaaatgtgtgaggatctgggatgacttaggaggatctgggatgaaaaaaagattgattattgcttttttgtactttaatcatatatgagtacactgaaagtggtctcattatttaaaatatcttgtagaaaataatttctaaacatgtattttgcaagataaatagtaagctcctaacatatatttactaaatttagaaattttcggatgatatttcttaatcacaatgctttttccccttgtactcactagagagctggccttagtccagaagtatttttagtccagtctcataattctcttttccagcatgggcaaatataatttctaacataatttgttaaaaagtctctactgattctattttaactttgtatctttsattcattgtgcatgatccactttcgttggcacagaactggaaagtatagagtagggaggtaagggtaggctacagtaactcttaccaagaagaggaaagctaactcactgttgctcacagattctatgactgctcttccttcctctttctctcattcaatttattttacttccaattaagttaaaatacaactttgaaagataagatatgatatatcagattatgaaagcagcttagactagtgaagactttggcatgtatagaaaggatgactrtattctgaaagattattgataaattataaacgatattacattcaaaataaataaatacattttattctctaggtcctaaggcactttatacattcaattttggcagaatggaactgtgtcatgataaatatagcattattggattctctaaatatcaacaatactttgaggtctttaaagagtttgtgtcttaaatcactcaaaatagattcaggatctatatgaaccatttatggaaatataacctgtttgaagaaacaagttcactctctcccaatcctgacgattcttgccctggagtaggcctccatcagctcctgcttagatcagtactacaatctcttcactggtcttgcctcttgccaatttatctcccacactgctgctagaagtatttttctaaacttttcagtggcttaccawcctctacagaataaaaattcaaattcggccaggcacagtggctcacacctgtaatcccagcactctgggaggctgaggtgggtggatcacctgaaatcaggggttcaagaccagcctggccaacatagtgaaaccccacttctactaaaaatacaaaaattacctgggtgtggtgatgggcgcctgtaatcccagctacttgggaggccgcaggagaatcactggaacccggaaggcagaggtttcagtgagctgagattgtgccactgcactccagcctaggcgacacagtgagattccgtctcaaaaaaaaaaaaaaaawatccaaactcaactagctgcataagttcttaatggtctagccctgcctatatttcttatttcttttcctggaagttcgctgtgtataagttgcaagcacaccaagttaacccccaaatgccacagtgttttatgcttctgtgcctttctcacacagttccttctgtctgattttctgtttcactactatgctgctacaaagtacttataatgtttatggaatagattctgaggaaaggcaaggcagcttctgtaaggggaaaattgtaagtatttgctaacgctcttataagcacagaaatatcgttttttagactwcttcaaactgatttgatgtggctcaacaaacaaggtttttgtttgttwtttgtttgtttgctttagagttactatttttatcctaggataaagctgatctttttcattggcggaggtgagacactttttaaaacctggctttgaataagttgtgatttttttttccatccccaaacacctgctgtatggacaataattctattagtttcattggctaactactgtgataagcctcatgaaggatgggttaggcaggggatggattttctaaacgagggtgtagggagggtaggyaatcagaatctccacagagtatgtgtagatttaaaaagcggtgattctgacactttatttcccgaaggatattttttgcccaacaatttctgcccccacctctaktctatcatgttgagaatcactggttcttaaaagagaaacagaaaaggaattagtttgaattaatattttaaataaaaatgtgttaacagtgagattcctctaaaatgatccaacttagttgacatttttataaatgatctaaaagtatgtacgtgtagtgaaaattctaagtttgtaggttgggctaacatctctaaattcatgaactaagctaatgatgataaaatgctggaagacagaacatttatatataggtaggcaaaaaactggcagatgacttttaatgtaytgaattttgtaataaaatttaaattatacaagataaaagtcactgaataatgattttcttgcaaaaatgacaccaataaatcatttcagatgttcccataaaaatgttatcttaatgtgcagtggtcccaaatgaccaataaagtaatggacactatcaggaagaatgtaagacacaaaacagaacacatagtatctccgtgtaaacagtgtggtgyatctacatctggaagacagatgccattctccttgcttagcgttaataaaaactatacagtacaatggaagcatcctgcaattagaatgaataaatgaataacgtaagacatacatgacatayctaaaaaacattttggctatcatctagaataataaatgtttattaaggtgataataaacaccttaactagtttctaattaagaaactataatgttataaatgtctagttaagaaactataatggactgtattcaatgtatataaaatcataatatggataagaacagaggcttggataactcatgaaatattagaagtagaatgtccttcttaattttatttttattttattttttgagatggagtctcgcactgttgctcaggctagagtgcagtracacgatctcaactcactgcaacctctgcctcctaggttaaagcgattctcctgcctcagcctcccaagtaggtgggattrcaggcacctgccaccatgtctggcttttctttttctttttttttttttttggtagagatgggtttcaccatgttggccaggctgctcgaactcctgagctcaagtgatctgcccacctcggcctcccaaagtgctgggattacaggcgtgagccaccatgcccggcctacttcttaaagtgttaatgtgttaggagcaagatagataaatagatatgctatcttacagagtacatagaaaacatatgtaagttgttacccataatatgagtgttgcatgttgaaaatataaatagattcaagagagatttagccaaaaccaaaaaagagagacctataattgattgaaaaaccagagatatttggggttctctcaacttttttgagttggcatcataaaatacaatctgagataaagtattatttaaattaaccaaggaattttgtgcttatttaattaaactccaaaatgtaatgaaaattagaaggaaatttagcaaatacttttgttattcaatctaaccttagtttttcgacatttagtatgattagaaaacttgttaattctttaatcttggaataataacaatcatatgccaacttataatttgacacactacttaatatggtgtttttgtcatttattgagggtgtgtcaaatacaaatccctgtaccaagtactgggggttagctgaagcataagatrgtctcttcaaatagtctacaacctagatttaaaaacaggcaaaatttataaataacaagagaacaatagaggtgggtgctaattaatagtacagcagtatgttcttaaagtaaaatagatgacaacagattaggaaactactaatcactatggagaaactggaatttcaatttgggtactcaggtaggtggaagctgttaaaatactaattatcaagcttcacctcagacctgttggatcagactttctgaggaacgggaactggaaacctgaaaatcttttagagttcatcttgtgattccatgcaatcagtccatgaggcaatatttgggaagtacttgagtagagcattctatgtaattccaggaactggtaggcagagcaggtagagactgacattttgcatgggagaggaagacaattagtaaatctgtttgaagtcaaaggatcttctaagttgtagaagaaaaatgggagaaaattatgtaggctggagtcagattttggagagctttggatagtaaataaaagaggtttttgtttgcttttgtttttaayagagtataccactgaaacttttgaagcagaagagtaacctttataacatatatcttatgaatacataaagggttaaagtcagaagggctggaggcaaaggtctagctaagaaactataataatagttgaggcacaagaaaatgaaggcctggactaatgtgatggcaatggaaacagaagagaacggctggatatacattggtaatatagagaggaaacataattgtttctggtaagagcttgggggtctttaaccctttttaaattttttaattatctttttaagtaaactcagatgtttttatttctgcctctttttcctttcactttcatttctgtgaaaaaatattaactactccacataagaattccttgtttagactgctagcaaagagcatatgctttaaaagtgctaagaaagccaatgaccaaaatgactttaaatcgtgctttaatttttccatgctgatgaccagcatgatttgaaaccaaaatgtttagaattatcttatgcctgggtagcagaacatttagacacaagttaaagagggagggaagaaagattacattatatatctactggatggtaagtttcacggagtatattagtatttaaaataaagggagaaagtggatgtgtagtttatcatctaagctgctgtctctgaattagataaagtgtagcataacatgctttgtgactcctagaggtagctatgaacaaaacgttaatgaaagtttctataacttctttttctgaccattttcccccttcaatttcactcttagtgcccttgtgatcactttcttctagccccatcaaattctgctctcagagaaggtatagtcacttatacacagtataaatttatgcataggtgttaactcctccctggtacatttgtattttgaaacttacctctcatcctatgtaatgaaaatctggtttcctgctgaagatattttagactttaggaaaatccagaaaatggaagagattttctagatggtgggaagagattgcttcaactatttccatttcatataaaaatctgatactttctcacatgttctgggactataatatccacacctattctgataattttggagccatttttaaaaaaacacagtgttgtatttagcagatgtaaatagtctacattgtcagacaaataattctttctgtataaaagtttagaatctttagtgattagagagtaaacaaagagtatttcctcctgtctgattcagggaatatatcttctctggcccaaaggagaaaggtgggtcccttgcattcctgagaggccataaatgataaggaaaacgatcagtaaattggtatagaaatataagtctgtgcaatacagttcaatgatgttcccatgacattcttcagtaatatgctactggataaatatcacactgtatattgcacaaccgaatagtttgcttcaaattctgatatagttctaacgctgctgaaacaagctgctgcaacttaaattctttcaaaagaaagtattgctataattgtaccacatgctgatgtactttctaaagattttctaatgttttattttcttaataaatccctgaatgaatgacataatyatttttggttaaccagacatgtcatttaaatggtttttgacatcattataaaatatatatgggattaataagaagtatktttgatttattccctaataatgaggatgatgtggaatcagttctcttgttgcaggacatttcagttatacttgataccagcaattatgcaatcatgtggaactattttgaatttcatgctratttgaggggaattatactttctgggtttcagtaataatttatctacttgtgtttctttcttgcaggcttcaattagttttctaatttcttttagtgtattccaaggttctgacttaaatctgttatttaacagctacagggcatgctttcttagggtaaagtgatccaacgacaagattagtattatcaaccatatgtatcattgtgtttttttacaatagtggacttcagggttcatgggaaaagagaaaaacctggaagcaggttctgtatccagcctgctggaggtcactacctccacagagtcctttgtgttgccccttcaaagtgaaagtcaataaagaaatgtggagaaagtgaactcaattctttcctaactcaaacattgaatcattccctccaggcagcaaagccaacatgtgcacagcatatccagttaatggtcctatcccaatactagcactgacaaaagaggtttgtcttccgtgttaagcagtcactctgcttaactgatggaacaagtttatttcaacttcagtgctcataatttgggctttttctatttcactgtcacttttgaaaaagtcaattttgaataacatgcatacattactaaaggtcatttgcttatgtttcaggttgacaccttaaaaaaatacagctacatgttttatgtatatgtatatatcttacatgattttgacttggttcatgatggaggtaacttatacaagttgtttacaagaaaataaatgactcataaaacatctgtaaaataaatgtaagactgaatgaaataaatgtaaaatggtacttgagtcatttattttcttataagacatttgtctataacagttgatataaaattatattactctgttttcaaacatattttcttttagagaaacatttcttggttagagataattataccacttatcgaatactgtctatacagaaaactgctgtttattccagggatactcttaaaattaaattaaatttaattctatttctacttgaaggatatggagcattacaattatatttaattttaatacattatatgtgatttataagcactatctttacttcattctgaaatctcagaccaacaaatcacttggcttttcatggcacaatttttactccctttcttagagtcagaacaagaaaaatttatttctgtagtcaaggccaaaacagtggcttatgaattaaattattaggtgttgcttcaataaagtattgaattgaaataattcaataaagtatttacttaaattccttgattttactataaggcagacaaaaagtagccaaggaacttcatttgcaagaactaattagcagttgtcagagaatgaaataatcttcattatcaagacactggttacaactaagttatgcctttaaaagtgattgataatagcagtaatgagattgagaagctactggctgaaacatattgtcattatctttcaattttttacgactctaagaagtcataatgataagcaaactcaaaatgagaaatggtgataaagagaatggagaaaatgtaaatccacatcaaaccaaagaattctcaccttcacagtacaattaagagtttaatgattccatcttttcattagaggatggcattaaatagaaatggtagctatgctttaacatatttcttaattctctggtaaaatttaagccctgcatacaaccataatcaaaatgggacattctaatgttgctccatcttttgaagaccacggtattatgatcaaagcgtggaaaatgatggaattctaaaatgttactgtagattgtaaattaaagaggaagacagggatagaaaaaccacatgtgagaatactttaagtggcaccttataattctttaacactgggaacactgggaacactgagtacatattaaatatttttaaaattaaaacactatcattatcactatattttaaaaagtcagatatgaaattttttggtgctgagcaaatttcttttttattaccaataagcaattctgttgatcctacatatctagtacagctacaatttcactgtggatctagatcacaaagtgattttcttatgccaaatttaggacaagtatatacaaaaccactatcacttcaaacttaatatcttcataaaaactccaacacattatcactcccacctagtaaaaatagcatccccttaacttttatgataccttaattctcaaaatgacctgtgtttgaaatgatatttgacttctctaacttcttttgctttagcctcaacatccattgggcctggaagttgaaaaaatgggcatagcaagaggaatgtgtaaatgtgatagaaataatttggatcattgctgttaagtataaatgagtatttgtgatctatcatatttgctgaagtttgacattaaggtggtacattccagtattatgtatcactttctagaagatcaatgaagtagaaatgcagtgacaagggtgtcatctagaaagaatgaaaagaaatacatccaagaactcaaacagcttgctgggagaaattccaggatgtaaggacaycaagggaactactgcagcccacctggaacatatttgttgtgtttgttccacatcttgtgcctgagatggttaccaattcatgtataatataaactgtttttcttgagtagatgtgaaagtgaaaagtcttgttgatactcttttctatgctacagcttattagaaaagataagtacttttaaagggagtagaaaaactaattcagaaaggaagccaagaagaaaaattctaaagaggctagggaatccaaaccatcattaagaatatggcaaatgtgaggccggatacagtgactcgtgcctrtaatcccagcactttgggaggccgaggtgggtggatcacctgaggtcaggagttcragactagcctggctaacatggcaaaacccctcctctactaaaaatacaaaaattagctggtgtggtggcacaacctgtaattacagctactcaggaggctgaaggaggagaattgcttgaacctgagaggcggaggttgtagtgcacctagatggcgccactgcactatagcctgagctacagagtgagactctatctcaaaataataataataataataataataataataataataataataataatatggcaaatgtaatgaatttatatacagaagaaagatgacagatatgtagagtactgaacatagttaagtaatcaatgacttgttttattcaaaaatggaaagttatgattttctaatcaagaatggcgaatctggtctttttgagagtgacaacagcatctcatgctttatgtaacaataatgagcatccagaaaagctagctgacattaggtaatttcttggctaggaagcagytgaacacaggtttgacagtttgctgagtggggagctgtggtcttcctgacacgtgtatcaagatctaaagggcagccagaaaagacgtatcaagctaactaaatgctgacacatgcaggaataaatgacagcaccggaagaaacttggaatccctcgtgacagtgamgttctggataagaaagtgaaagacatgacagcacaggtgttgttttcattttttcttctagttttatctcatgactttagaagtgaaaaaaaaaaaaagctgtgaaagtaaacacctggccattaacaacagtgttgaaaataagacttgtctttctggctgttagcttagaataactgaaaaaataggctcctggagttttatgtacattttatgaagaacgcatttgaagtaaagtgaaattggggtgcattagttaagattcagtttggcttaaaaaattgtttatttctccatgcaataaacatctggaggagtgacaactctgctccacaaaaacatctggaagtttccaagtccatttagctcaccgttccataatctctttgttctcataacccaaggtagaatccaaattccagcaggaaggtggaataaagtgattaaaagtgagcataaagggcttctgctgggtaccttttatggaagacttttggaagttgccataggacacttcagttaaatcgcatcagctaaaacttggtcacatggccacattaagctgcaaaaaagactgggaaatggaaagtttattttgtgcagtcagctaaaaattctattgctatggaaaaaggagagaataaaagttgggaacaattaaaagtctttgctcagaaagttggggagaaaaatgcgtacatatgattgaaggaatgaacatcacaatgaatgacattatactgtcataagcttgaagacttaaggggcaaagatatgacaagaagagaatagaaagcttattatgcctcataagaaaagggctagaatcaaaacgtgtaacttcaaatgggtagaaaaaaagcacagwtgtaatgataaatagtagatggaaaagttacatgacattacagatgaagacatttcccaaatttgctaatgacaaataagagaaaggagtatctaattttttgggtaccatacattttaatatactcatgtatcagttatttgtgatttattccatgccaaattataaacagaattaaagtggctgaattaaaactcaccatttcttaagcaattgtatgtggaccactcatgtttccaaaggtacttgggggattaatttaactaaaggcatactgtaatcttttttcaactgaatattttttaaaaacatttttgtattttttcaatttagaaaagaatggtttgagtgcctccacaaacatatcaaatatgaatgccaggaatttagaaagatgagacagatttactcacagtttagttaaytcatccttttgtcatttaatgaagtcatgatgatgttcactattatataaataagttcattcattgtcatatgctgctaaatttataaccttaacaaaccattggttaacaagagaaagtataaagaacattgagttaaatataagttattagaagcataaaataactccaaaattcgcttttattttttaaattgatgtatatttgacaatttacagttaacttttagataattttcttcagatcactacagtcctagtgccaagaatgggtctggcaataaacactcagtaaatacttgttaaataacttgtatgttacagaaaatattgtgayaatcatattggagttggtctcacgttttggaggggtataatgactctctaccccagcaatattttatttatggagcactatttacaaatagaagaataaaactatttctcttatttcaacatttggaaaccaaagaaattgtaaaaataagtgagctaatttttttaaagcatagaaagaattttaatgattagattccaaaactagattttgtcatctttgatgttataacatttatatttcaacatatatttatttaactcacttttaattctacacatgctgtatgaggtcattttaaaatgtattttttcaaaaatcatgaggtttttaaaaacataattaatgtaaagaaaatgaggaacattcatcatttgttgcaggggaacagttgacatttgcctttatatataatacatatttaaacaaactttataatataaccttgaaaaatatactaacctaaaacaaaatgtatttttgataggcgaactttttattatattcaaactctaaaataatgacaggatttaaaatatttttaaggagatggtgagattgtattactgtaaaatacatttatggtctatatcaaggaaaataatgaacactattctgtcttaggctatctatatcagcccagttcttgctgagatacttatttttagtaaataatgtagctggtaaagagtctggaattcataccgtatgagaaagggccaaagaaactaaggataatgggaagcatgatcaatgtcttcacctctttcaagggctgttatgtggaaatggtattgatttattctgcatagcttcagaggatatattcacgtataattggtaacacaatcagagctacttgtaaatgtaatgaaccacctgaaaactggtaacctacaataaattaatgagattatatagctgacagacaggtaaatcaatgggacaaaacagtcaataaaaggtaaaagagaggcatcagtaaaaaaaggaatagaatgtttaataaataatgttgaaaawactagatagctatttcaaggaataaaatatcagttttcggcaggagcccccaacccctgggctggggaccgktactggtccatggcctgttaggaactaggcggcagagcaggagatgagctgcgggtgagcaagcattccacctcctgtcagattagctgtggcattagaatctcataggarcgtgaaccctattgtgaactgcatatgccagggatctaggttgcgtgctccgtacgaaaatctcactaatgcctgacgatttgaagtggaacagtttcatcctgaacctccccccggctcccgtcccctgactgttggtttagagtatcatctcacaccataccccagaattaattccagatgaatttaagataatttgaatttatatttaaaattcaaactataaaagatagaataaactatatttcagacaatggtatggaaaacatacttttaagcatagatacaatataataaattatcacaaaagatctatagaattggttacacaaaaattgatcagtttgattaattttttcaccctgcactccgrtagtgtatgattagtgaaacatgagaattaggaatagaacaaggagtgtgaagtgagccaaacagtgcataaaataaagtgttactgaaagaactcttggatttggcaattaggagtttattcatgagyttgaagagagaacgccaataaagagattagaagttaggatgcaaaagttaaattgaagaaaaatgagcagattctggctacgtgttcaagaaagttggtgctagtgaaaaggaaccagggtagtcctttgaaaagatttcagagttaagggcagggacattttattcatttgacctataggcacagagatgggagcctgtgaaaatttcaaaggcttgcaaatgtatttaaactttaatattaagatagtgacagtaaaatttgaaaataaaatatacagattagcagatatttaacaaataaaatattatgctaactttattatttattaaatttattaattttttcataacatctaaaaacaatttgatattttttttactttgtaacaattcccaagaatgtacacaatttgcagaaaatttacagctggggcgggcacggtggcttatacttgtaatcccaaccctttgggaggctgaggcaggtgaatcacctgaggtcaggagtttgagaccagcctggccaacatggcaaaaccgggtctctactaaaattacaaaaattaggcggtcgtggtggcgcatgcctgtaattgcagctacaagggaggctgaggaacaagaattgcttgatcctgggaggttcaagacccttgacaatttggccctaactctttttccaccctctcactattttgttacacttcctattccagacatacagctctagtttcaatcttctgaacatgacttttgaatctttgcttccatggccttgcacatagtacttttatctctcaattagcatgtttccatcttttctacctatgtcaactctattcatccatcaagatctaattcaagctctatctattcctcaaatcctccgttgaccacttgaccacttctttcttctgaattcctatttattttgctgttttgtttttttgtttttggtttttttttttttgcatttggcatatactgccaggtatcacttattttattttttctgtggaaaaagaaaatactaactgaatttttgtatatatttattaatatccagataggatatcataattaaagtaatcagatcaagtttctaaaatattactggctcttgttttccattcccaaacacytgagagakactgtacacttaacaagtgaaacagtggtctgtatawccagtatttgtatcctacaatttccaaagtgtgtttttattatgaccttactcctctttactgtccatatttcacaaaaagaagttatccattgggtaagaagatcttaatccattaccaaagacatttttaatagtaattaatmaatcacatatgttctatatattttggacataaataaataatgtaaaatgtcggtacaaatagtttctctacactcaatgatattatattattaaagtcagctgcatttaaaaattagtagactttgtattttagaacacttttagatttacaaaaaaaattgagcagataggccaggcgtggtggctcacgcctgtaatcccagcactttgggaggctgaggtgggcagatcacaaggtcaggagattgagaccatcctggctaacacggtgaaacctcgtctctactaaaaatacaaaaaaattagccgggcgtggtggcgggtgcctgtagtcccagctactcgggaggctgaggcagggaaatggtgcaaacctgggaggcggagcttgcagtgagcggagatcccgccactgcactccagcctgggcgacaaagcgagactctgtctcgaaaaaaaaaaaaaaattgagcagataatagagttcccataaacaatctccatttccccccacagttcctccattataaatatcttgcactaatgtggcacatttattacaacagatgagccaatatttatttatgccatcagtttatactaaggtccacgttttgctttgtatagttctatgagttctgacaaatgtatatcatgtatccactattacagtattacgcagaatagtttcactgatttaaaaatcccctgtgattsagcttttcatcctttttctgctctcctcaaggcccttgccaccactgatactactgtctctaaagttttgyctttgccagaatgtcatatggctggaatcatacagtatgtggctttttcagactggtttctttcacttagcaatatgtacttaaggttccccttgtctttttgtggcttcacagctcaatacctttttattgctaaataatattccagtgtatacgtgtaccatagtttgtttatccatttacctattggatatgtgggttgcgtctggtttttgatgatacgaataaagcttctataaatagtcatgttcaggtttttgtgtggacatagttttcaattcaattgggcaaaaacctgggggcatgactgctggattatatagtaagagtatgtttagtttttaagaaactgccaaactgtcttcccatgtgactgcaccattttgcattcccactagtaatgaaagagttttggttgcttygcatccttgccagcatacagcactgttagttttttggagtttagtcacgctaatagttgtacagaggtatctcattgttgttttaatttkcaattcctttttaaataatttcaacttttattttagattcagggggtacatgtgcaggtctgttacctgggtatattgtgtgatactgaggtttgaggtatgattgctcccatcacycaggtactgagcgtagtacctaatggtttttcaacccttccctcatctactccccgccagtagtccccagtgtcagttgttgccatctttatgtccctaagtacccagtgtttagctcccacttataagkgaaaacatgcagtatttagttttctgttcatgtgttaatttgcttaggataatggcytccggctgcatccatgttgcaattctttaatgatctatgatattgagcatcttttcatatgcttatttgccctttgtgtatctttagtgaggtgtccagattttgcccactttttaactaggttttttttttcttattgttgtgttttcagtgttttttgtatatgttggatatattgatatattttttgcatatatgtatatgtcrgtgtattttagtgatrtaaaatgaatggaatctatagccttaaacataataaaaatatataatagttaagatttcccactcaacaatccaggcttgacagaaaatcataaaatgtatttaaatttaaatgtttttttctttgttgatactagttcttagttttaacatgccaaagagggtatatttgatcaaggacaagattaaatgttctgattggctaaccatcaaaccactgcctccactttttttccaacttgaaaataatatttagttatcaygctagcacagccatattaatatataccccttcaaamctttaaatataaagctttaaatgtttcaggaaaaagaaatattaatgatgctgagattggtgggcatggattctgtgtagtgagacactaaaaagtaatttttcaaataggaaagttaaagcactttaaaatcacaaagctattggtaattaaaaaaagaattagtatcaatttctgaaatacaagattagagggacacctaaaattatgaaagattttagagaatttttttaaaaagtaattgcaatttagatcaaagtttcccatttttcattccaagtgtgatacaggtttaaataataaacmgacaaaaaggtttagataaattcatgaattattgaaccagaggataaaaaatagggaagctatttagggcatagtctctagtgtgtaagggtgacatcctaaataataaatttgtgctattattgacaatattgytgacaaggctaaatggtcaatgtgcttgacatattgcctggtttttcatgttctattgcatgagctgattctctctctcttttatttatatttttgaactctaccattatgcyatcatggacattatgtcaacaatttgatgcatctatgtaatatgctttaaatctttggaaataaatttactgggtgctacttaatgtgaacaaacttctcttaagcacaaatggaaatccacaaagaaagacagcctcttctatttgttttatgtgaggcaacggatacactgtagacaaaaagaccaagtataattaacttatattggtaactaacttaatatctgcatattacatatttttctattatgttttctgagcaacttcgtggcttctgatttggagggtaggatttcatagttaatacctctgtttttttttttttttttttttttttttttgggaaatggagtctagctcttgttgtccaggctggagtgcaatggtgaaatctcggctcactgcaacctccgcctcccaggttcaaatgattctcctgactcagactaccgagtaactgggattacagacacccaccatcatgcctggctaatttttgtatttttagtagagatggggtttcaccatatttgccaggctggtcttgaactcytgacctcaggtgatccacccgcgttggcctcccaaagtgctgggattacaggcgtgagccactgcgctccgcccatagttaacacttctataaatatttgtgcatattgaaaggaacatcactccccacactgcaagtgaacaaaagagtgataatgttaatttctttattcttgagcttttcttgaataaaagagggttgtaggacatggaacaaaatagactagaaaatmgggttgataagctactgattctgccaayactgcttaatgctcttcccaagcaattgtcttttagatatgttgatttcccagtgttaatggtrttttttaaatatgtcaagcaattaagaatataagtctattctcatctcagttaaacrtagaatctttacaaagaatttttggtatccttaaccctaatatgtggagggataagattaaaaatgttcatcaccttatttttatttatttatttatctattattttgagacagagcctcactccacccacactggagtgctgtggtgtgacctcggctcattgcaacctctgcctcccaagttcaagtgattcccctgcctcagcctctcaagtagctagaattataggaatgcaccaccatgcccaactaattttttttttttttttttttttggtgagacggagtctcactctgttgcctaggctagagggcagtggcgccattttggctcactgcagcctccgccttctgggttcatgcaattctcctgcttcagcctcctgagtagctgggattacaggcacccgccaccacacccggataattttttgtatttttagtagaaacggggtttcgccatgttggccaggttagtattgaattcctgacctcaagtgttccgcctgactcggcctcccaaagtgctgggattacaggtgtgagctaccacatccagccatcccctytgtaaagtgcagtaaagaaacagtgggcaatagacaggcaggggatagaggaaaatgttttgggagaggggcaatatgaacttattgtcatgactggaccaaaaagggaagatgtctgcctatcataattaataataactctrtcagtcaacatttatgttttacawttgttctgtaaaagaaaagccagcaaacattacagattccagtccctaataactgatcatgaaagacactctaaacttgtgcatcagcattctctttttatctaaaagaaaatatattaaataaagggaggaatggcaggagtaaagagacttgaaggaaaagaaaatattgacttmttaatgatattttacaatgctaagatctttagaaaccaactattccatwtgtcttttaaatattaggttggtgcaaaggtaattacagtttttgtcataaaagtaatggcaaaagccacaattacttttgcaccaacctaactgatacatttattccattttggaggtattgcaaatatgttgaatcaatgaatttmttcagtatttttcattttattmgtacaaatttaacctaatagtattcttctgcatgttatttycctttgtgcttcctttactgcaatgaagytgtagttaccaaatagagtgctctaaaagggcaaggcttgtctgtgaattaagcctagcatagaaytggctctcagtgaagatgtgytgaacgttwcatgaatgcatcaacatcataatccttcatgtgcttgtaagcaattattaaaattttctctagcctattcaggcctgtgttcttcaaaattctkcaaaatatatggacgtgtttgctgtttctattaggttttaacttctggtgtcagaaaccagggcwgtttttcttaatttgtgtcctaaaaccacagtagggttgtatgcattgtgataatgcttaataaatatataaaagattaatatccattcatttgcattttcttaataaaacccaatttctagatgagtagctgtgaaactctcaactggacgagctctgactagtgttaagtatagtatattgggaaaarggcttctatatgcaacatatatgtgaggcaaatgacaaatattagctgggctacattaaatcccaatgacatgaatagaaattttattatccaggtagcaaaaatgaagtaaaaaaaataaataagagaatgaagtraaggtatggggcaaaacaattagttttttmtttaagtcaatattttagaaaatagtttttgaaggcccaatcacacagataattgacactwtgacttttctttgcactgtgttagacataggtaaaagaatgtctcaggactrtaccttcatgtagaaaatgtaattaatagcaaattrcataaaagtrcrttaaaattttaattattacatcattttaataaatatcttgagattttactttatttagtgtgtcattaaaayacaggatttaaggamgatatatataataaaggaaaatagtaagttaccattcttrtgyaaacayattttgtaaatactatttcaacaaagatttaaaagttaattacaaaggtataaagttatgaagtattatataaacaggattcataattttgttttaaatggtcttttaatgtatcaaaatactatcagtttaaaacaatcttttttttaaggyagtaggctctgtttaccatcatttacacttgctttaattagaattttcttcactttcagtayattcaagagctattctgttggcaataatttttaagataaagtttatccaaatagaaaagtaattatataatgattaagagccagaatgtctgggttcaaattmcagttctgctacttatcaggtataagaatttgggcaaatttcttagtttctctgtgcttcagttycctgatctgtaaaactgggataacaagactacctgtctcaatctgyggttatgagtaaatgagttaatacataagagcaatgcaataatccttggmatgyggtatgagttmaataaacattagctattattattatagtaaattagaaatttaattctagagaataaaaagctgaactcaaatatgtaactatttatttgatacagacayattttctacaaaataaaaaaccatcrgtttgcacttcccttatataatgactatcttggtgtttgtgtgtatstgttgtgggtcaggggtcttgggctgwgtaaataatcacattaaaaattttaaaaacttccgattaaaacagaaataagaacaaatggccattcgtggatcatttgcaaaaytgaacgaatayttgacatgtctttctgtgattccttgcagatatcatggaaatcaggacagtggcagttggrattgtggcaatcaaaggggtggaaagtgaattctatcttgcaatgaacaaggaaggaaaactctaygcaaaggtattgataattgatagcttaggcttaatttttaaaactcatttttgtcraaatatctcacctttctgaaaagtaaaaatggaattaatttatctccaactgtataatwtaatgattttattaaaacactttatactcaaacrttaagaaaaaatgttttctgtgtgactttggacaaatggcttgttctttggattttggtttcttcatctgtaaaatgadttgaatyaactgacctctaaggatccttccagctctaaaattccatgtgcattttagatatttaaaatccaaaatttccatttgccagtattaaagctctttttgytaaagttcacycaatttgcacattgctgacatgaaaattcttgggaaaaaatcttgaaatgtttagttcattcatcaayatcaatctcacaatcatgggcattgaaatgtaattattcacattgtccccacttcactacaatgcaaaatatgtaacagttcatcccaccataataaaatataattggctttcctttgtattcccacagctaggcataatgatacaggtttaattgaatgaacaaatggttgcatggatgaacaaacaaattaaccttttatcttccattaccattgaagacaatgtagaagtaaataaagttgtgaaacaagtctctcacctgagggaggcagaggttctgctaattataccaaatttccagtggttaaagaatgagtgatgtgggaataagtaatatgaggcctgttacttagggggaaataggtcctaatttaaagaatagttgacatgaacttccaaaaagctacacatatttcataactagctgtgtattatgtggtgtttttatttcaaatttaagatacctttttatgcaaatatactacataagtatagctaayaawccacattaggcctgctcaatctgagggttaaaaaaagttgtgtatgtttcaattctaccaaatattayctgcttactcttcgtttaattgagcctctctaaaaatcatttggawaatgtctgtttgtttgtttgttttaacagaaagaatgcaatgaagattgtaacttcaaagaactaattctggaaaaccattacaacacatatgcatcagctaaatggacacacaacggaggggaaatgtttgttgccttaaatcaaaaggggattcctgtaagaggaaaaaaaacgaagaaagaacaaaaaacagcccackttsttcctatggcaataacttaattgyatatggtatataaagaaccagttccagcagggagatttctttaagtggactgttttctttcttctcaaaattttctttccttttattttttagtaatcaagaaaggctggaaaactactgaaaaactgatcaagctggacttgygcatttatgtttgttttaagacactgcattaaagaaagatttgaaaagtatacacaaaaatcagatttagtaactaaaggttgtaaaaaattktaaaactggttgtamaatcatgatgttagtaayrgtratttttttcttaaattaatttacccttaagagtatgttagatttgattatctgataatgattatttaaatattyctatctgcttataaaatggctgctataataataataatrcagatgwtgttayataaggtrtatcagacctacrggctkctggcaggatttgtcagataatcaagccacactaactatggaaaatgagcagcmttttaaatgctttctagtgaaaaattataatctacttaaactctaatcagaaaaaaaattmtcaaaaaaactattatgaaagtcaataaaatagataatttaacaaaagtacaggattagaacatgcttatacctatwaataagaacaaaatttctaatgctgctcaagtggaaarggtattgctaaaaggatgtttccaaaaatcttgtatataagatagcaacagtgattgatgataatactgtacttcatcttayttgccacaaaataacattttataawtyctcaaagtaaaattgagaaatctttaagtttttttcaagtaacataatctatctttgtataattcrtatttgggaatatggcttttaataatgttcttcccacaaataatcatgcttttttcctatggttacagcattaaactmtattttaagttgtttttgaactttattrttttgttatttaagtttatkttatttatwaaaaaaaaaccttaataagctgtatctgyttcatatgcttttaattttaaaggaataacaaaactgtctggctcaackgcaagtttccytcccytttstgactgacactaagtctagcacacagcacttgggccagcaaatcctggaaggcagacaaaaatragrrcctgaagcaatgcttacartagatgtctcacacagaacaatacaaayatgtaaaaamtctttyaccacatattcttgccaattaattggatcatataagtaaaatcattacaaatataagtatttacaggatttwaaagttagaatatatttgaatgcatrggtagaaaatatcatattttaraactatgtatatttaaatttagtaattttctaatctytagaaatctctsctgttcaaaagrtggcarcactgaaagttgttttcctgttagatggcaagagcacaatgcccaaaatagaagatrcagttargaataaggggccctgaatgtyatgaaggcttgargtcagcctacagataacaggattattacaargatgaatttccacttcaaaagtctktcatwggcagatcttggtagcactttatatgttcaccaatgggaggtcaatatttatctaatttaaaaggtatgctaaccactgtggttttaatttcaaaatatttgtcattcaagtccctttacataaatagtatttggtaatacatttatagatgagagttatatgaaaaggctaggtcaacaaaaacaatagattcatttaattttcctgtggttgacctatacgaccaggatgyagaaaactagaaagaactgcccttcctcagatatactcttgggagagagsatraatggtattctgaactatcacctgwttcaaggactttgctagctaggttttgaggtcaggcttcagtaactgtagtcttgtgagcatattgagggcagaggrggacttagtttttyatatgtgtttccttagtgcctagcagactatctgttcataatcagttttcagtgtgaattcactgaatgtttatagacaaaagaaaatacacactaaaactaatcttcattttaaaaggrtaaaacatgactatacagaaayttaaatagaaatagtgtatatacatataaaatacaagctatgttaggaccaaatgctctttgtctatggagttatacttccatcaaattacatagcaatgctgaattaggcaaaaccaacatttagtggtaaatccattcctggtagtrtaagtcacctaaaaaagacttctagaaatatgtacyttaattatttgtttttctcctatttttaaatttattatgcaaattttagaaaataaaatttgctctagttacacacctttagaattctagaatattaaaactgtaaggggcctccatccctcttamtcatttgtagtctrggaaattragattttgatacacctaaggtcacgcagctgggtagatatacagctgtcacaagagtctagatcagttagcacatgctttctactcttcgattattagtattattagctaatggtctttggyatgttttkgttttttatttctgttgagatatagccttyacatttstacacaaatgtgactatgtmttggcaatgcacttcatacacaatgactaatctatactgtgatgatttgactcaaaaggagaaaagaaattaygtagttttcaattctgattcctattcaccttttgtttatgaatggaaagmtttgtgcaaaatatacatataagcagagtaagccttttaaaaatgttmtttgaaagataaaatyaaatacatgagtttctaacaattagaaaagaaaaaatkaaaacatgaaatgawaamaaaagtaaacaaaagatactttcaaagcagtgaacaaaacattttgacataarccrtaatataaattataatataaaaaytaaaaaccatagtataarttgtcarcctttgagttggctacaaattcartttaatgamagaagagaagggatgctggaggtaaattcttagggtttctatctcatagagtttgctcttctgrttctctagactgccaaagaacataaagatgtgcgaggggacctagctgtrgtaaaagcaatcctataacaagaaaaactctaaaacagtgccccttackattttctactgaaatttctctaatagtagaggtgtaaaataagaagttagagaataatgcmaagggggcccaccacagacggaacatttcttttctcttaagactcatgtgatttttgcatcttactccataatatatttgtggttgcrttaatatgacaatgtctgcaattaaacaccagtaagcaaaatygatacatcagaatgacttgcagggcttatcaygcagtttggtttacatccctactccactgccatttacttgagcgtgaatgagacacaraarrttmtttgcytcccataatscaactttacacataaataacacaaggctaaagaaaaccagaactcaaattcaccacgcataggagtgataacaaaaatatttaacagtcrgtatggktgatyactggccaatcaraatacrtcactgatayatcgaaatggatgcaggccactatgactaacttgtggrtatcatttctatgatcaccctaaaacagagttgggaaaatatcwattaactggwmtctctggtttgaattctcaatatgtatcttaatatgaaatagctcattaaaacttcatgtgtaactatttsagcaytgttgtcagctactctttattccacttctgtacagtatttattcaaccaagctgctgctttcartgaaggtcacttgttccttcagggacacatrtactcccacctatcctttaattttgaatggtttgtcaggaaaatttactttctcttgagttgaaaaacttgacaggaagcaagaaataatayagtcctagcctctttccartaacatctgatttctccattctcaaactacacttctcaaggaaccagatatttactctcrtctgggaagatgcckcttatgttttccttttacttcctggttatcatgtggttgcattttccaagttcttatcattgaatttatgagagcctatcaaaatttattttctttcatttatattctaataattgaaatgtgagatgaaaataacatttcacttatgaaaaacccttctcttgatgaatccttccatgtgttagttatctattgctgtgtaacaaattaaaacttaatggcttgaaacaaatatttgttttctcatagtttatgtggctcaggagcctgggcatggttcagcacagtgtttttggtcagaattcctcatgaggctgcaatcaaggtgtagaccagggctgtagtcatctatctcaatattcaactcagaaagggatccaccttagatcctcactggctgttatcaggacctatcacttcctaaccacatggacctctccatagcactgcttacaacattacagtctgtttcccacggagcaagaaatcagaaagtgtgagatgaagtacccaaaatggaagccacaggtttgtttttttattttaatatatatagcctagtttcaaaagcgatgttacctctgcctacactcatgaggagggtattatacaagggcatacataccagaaagcagggatcactggaagccattttacaggctgcctgatccaagtcataaactaggtgtttttaatgtcactgccataaactgggattctacagggtctaataagagtaattcatggctttcagtgggcatccattcatcagagaaagagatgaaatatgtatattctctgtggaaacattcttgattcttccttgagggatactgcgtggtccattcctacaaaggataattaacaaaaggtttgaaccaatctggacttcctcttagcctgagatgtggctacttagaactcccaatgtagctgcaaaactaacaatatccctttgcctccacatgaagcaaattaccctgccatcagactcaacatgaagataatcctccctttagctgccctacctcaagagaataagatcatagatgccagctggaattcctctaggccatagagtgttttgttctagatgctgaaggcaatcagccaccacttacccaagaccatctgagaataagacctaaaaagacttgaaaacaattgatttcaatggtaggtacacactggtatcccctgttctatatatatctatagatatatagatatatacagaacaggagatatatatatatattttatatatatatatatattttatatatatatatatattttatatatatatatatattttatatatatatatatatatatatagagagagagagagagagagagagagagagacagagagagagacagagagagagagagagagacacctaggccccaacgcaggccaattacatcagtgtatatgacaggtggcccatgcagtggtattttaaaaattccccagaagattctaatgtgcctctgcagttgagaactaattaggtaaatgaaaacaacaacaaaaaccaaaaaacctcttcagaaactatgcctgcttcttcatctttgtcccttctttaaacaccttgaaaggtcttattccctcccagcccctcctgcccctaggttttcctagatgcctccatatttctgctattcacaactggggctcacaggaaatgtagacactagaaagagagttacaattgtttttgcatcagaatgattatggaatacaaagtgcacaaaagttctccctcccccaccacagtccattctcaaacagagcagccaaagtgattctgttaaaatatatttcagatcatgcatcctctgtttaaaattgcaattgttttccatattcttcagaataggagcctgtccttatagtggctaaggagtggcaatggaagaaggtgagtaattaaaaactttgctgcttaattaggtgggcaaaacaacaagaaaaagtaataaaaatctagagaaattatgcacttaagttgtttggcagatgtcactgaattcttagttcattttaaagaaatggatactggatactatagacaatatttaatgggtataatcattattagaatcatactcagaggaaagggcatagctctacatcgaaaaatgacgaatgtacctttttatgtttgaagtaaatatatttagggcatgtacatatcaccttaatgattctccacttgactgaaatttttccattaatcaaccaattaatagatacaaccaggctagatgagagggcttctactttactatcacttctttattatatatctccgattgttgattatttttggttatttcaattattttatgaagataaatatgaacaatttatatatgtttctttatatttctgattttcttaggacgattacaggaaataaaattgaaaaactgattttctgaaagttttttccagaatatattctaatcagcagtgccggaagtaaatattctcacttttatactcaaaatttagtcagctcttattcttgtctctccttccctttgactctgtgaatatggtaaatcaccaacactcagctaacttctttctcaacatccattcagattcatctctttcttcatcctcctacagctttattacttcatgcctagaatttagcaatagctccttaatctttcttgtttcaaattccttcccatctcatatactgcctaattctttaatcttcctataatactactttgactatttcagtcaccaattgaagacccatattggctcttttttgcctgttgggtttagtttaaatctcttaaactagcacccaaagctgtcaaacaattggctctaactcgactgtccaatcttctcactgttcaatatacacctagtagtttctttagtccattgtatttatcatgatttacacaagttgcaaattgattctgcctctgagttttgtctatactgtccccactgcttagaatatctctacttcctactgtcaatcaatccataccctgctctgctcttaaggacaaagctcaagtttaatgagctattcccaaacttgcccctgccttataacaatttttttccttctctgaatcctattgcactctaatatagtaattgattgcacacacacacacacatatgcacacacacacacatatatatatgcaatgtttatgtatatgtgtattcatctacttcagttaaacaagcatatattgacaattctaccatgtttgtatcaagcactgtatgataaatatatgttgagtgtgataaaagtaaaagtaactattgcctttttaaaattccccatgtaatctggtaaggaaatagaacgtcaaaaagtacttaatactattaatacttgcttactaactgatccatattaataatctattgataaaatatataataaattttatatacaaagatctttccagtcttgtcatcatgcctacataatcttatctattgccatacaaaggtctgtgttatatattggcaagtcctttagaatctgtttttaaaaataacttatttaacaaatgcagcaatcactatgtgaggtaaaaacacatctatacttttaaaaaattctgtcagtcacaggtttgaaagcacaagatatttgatagcattgatagtgatgctagtcctgtatacaatttaaatagaatccatcaggaaaagcaagagatcaaaactttttgcttttgaagtacttcatcccttatccttgaaagcttagtgtgttcagcagttcacgctcataggccttcttagaatgaatcatgtaacatttttcagcttttctcccttttctttattcctgtctgttattgttttgctaggtggcagtgcttatctcaattcaattttaagtttctatagtttacagcgttaattattaatttttcatatttctcatttattgtacatgtcactcaactagctattcatctgtccaacttttatgatattgctctataatgaaaaaagaaaaatgttactttcttgctaataaatcttcctaattatctccattcactgtttcaaaaataatattggaatttttattccctttcagaagataaatatttaccatgccttaatgttattaaggttaaatcacaggtgatattttattgtcttctaaatacttcattttcaaattttctacattaatatatatgatctttataatcagaataacaatagcaaatgtggtttaaaaaattatcttcacattcagtttttatggagctggaagagtgggatgttggtgcagcattgatgtattaaatagcatggtcttctacataaatgatcaaacctggcacccacattgctcatctcattcaattaactaaacttactgaaactccataatttcataataatgtagtcattgttaccatattttagtggtgactgtgtcctgaatcttcttcttgaatctgttcctttatccagtaatcaccaagattgctcaactcttcttacctaatgtccctcagtctcatctcttcctcactactttcatgacctcattaaattgtacctaaagtttagcaatagcatcctatttgtttttctgttccaagtcctcgtctcaattcctgtttagttacctaatattcctaaaatgtcatttaaactatgtcaattaccaattgtagaacccatgttgtctctctagggctcactgaatttgggtaaaattctttaaactagaaatcaaaaccatcaacaaattggttccatccatctggtccaatctcctcactgttcacaaacttcatagtatccttagaccattgttctcatgtcattttgtacacgcaccatacttccttgtgtctctgggatttgtctatattgtctctatcatccagaatgtctcaacttctcactatcaatccataccctgctctgccatcaagaacaaaatcaagattctcctctttaatgattaccagacttggtcctgccttacgatgatttttctcttctataaattcccactgcatgtcaatctatgccattaatctagcatttagagaatttttatctctatctcaatagaggatggataggcatacctgtatgtctatctatccatccatctacacttatctacttaagcaactaggcatacctgtgtgtctatctatccatccacctacactcatctacttaagcaacacaaatacacacacacttatgttatatatgtccacatctatttcagttacacaaatatataaaggggtctgtgtatgtatgtatgtgtatatatatatatatatatgtgtgtgtgtgtatgtatgtgtgtagtcaatagtacagtgtcaggcactgtaatagtgttaataaaatccatgcttcaaaatttaaaacaattacatacctatagatatataatcaattttatgaggatcagatttggaacaaatgagcctttggaaccactaagaaccataagtgatagctgacagactgtcaagaaaaaaacttcctaagtctttagcatgtcagttgtagagcacatgtataagttaccattgtgctttgaccctaacagtaattttaatgcttgagtcttaaatataaatatgcatatattaaacaactgccaaaccagtatcaactctattgccttagtgggagacacacaaacacacacacacacacacacacacacacacacaccctaaacatagagtcagcaataaattcaaaaaattcagttgaacaaagaaacgtatattgtcaagaactgcaatttcagttttgtttttgttgcaaactttctggttgacttcattctgtgtttaacaaggtccagtattgtcctggaagtccatgttacaagacggactttattagtgaaaacttttcctaacattttgctagatttatacattgcactgatttactctaatgaaaacttagctgtcctcttaggatactgcttcccctgca

SEQ ID NO: 97065 - DNA, 57336 bp, Homo sapiens
tcccagctactctggaggctgaggcaagagaatcgcttgaacctgggaggcagaggttgcagtgagctgagattgcgccactgcactccagcctgggcaacaacagcaagactctgtctaaaaaaaaaaagaaagaaactttaagatggcaccacaacagataatttgtgggcagacttcatgacacgcaaactgccgtccatgatagtctgttagcccctactccatctgaagatgcttcaagcacagcacctggaaatcttgagtagctgccctctgaactcagaaactgagtttatagttggttccaactaatatctttttcttttatcttcaacatgcaacgcctgatggctcacaccatggaggatatctcctctactgccggtcccagcagatgattcagctggcctttaatgaacaaaaggcagcccagcaaggaaatggactcgtactattcaaggaaagataacctcttctttccttgaacaagaggagggaccgacaaagattctttgcttggccaaaccaggcttctgaaccttcttctaggcccatctgtgcacttccttgtaaatttcacttagagcaagaaccctgcaaagtcactttagcaagaagcatcccctgaccctcgacatctgatcaccctccttatctaatccgttcctacactgtcccccaggtgaagatgtccggtcactgtggcctgtcttcagcaaaaatcctgttaattggtgtagccagaatctccctcacccggggtgtttcttcttagtcattttccatgtgctgacccagctcccaccgccctgctcctcagctatcatcagttcccacttgcccattcggacttgagcttaatctctctcccccactgcagaatctcattcctgtggtccctagacctagcaagacggtcctgaataaagtcttccctacagtgctttagcaaatgtcattcagtaattctttctttaacattatcagtgttaatttcctggttgtaatcatttttctgtgattgggtgcggcattcacatttggggtaactgggtgaaagacactagaattttttgttctactttttaaatcctttagtaaattgaaaaaaaaatttttttttttgagatggagtcttgccgtgtcaccaggctagagtgcagtggtgccatcttggctcaccgcaacctctgcctcctgggttcaagcgagtctcctgccttagcctcccaagtagctgggattacaggcacctgccaccatgcccagctaatttttgtatattttgtagagacgaggtttcatttttttttttttttttttgagacggagtctcactctcgtcacccaggctggaggacaatggcatgatctcggctcactgcaacctctgcctcccgggttcaagtgattctcctgcctcggcctcccaagtcgctgggattacaggcaggtgccaccatgctcagctaattttgtattttttgtagagacaaggtttctccattttggtcaggctggtcgcgaactcctgacctcaggttatctacctgcctcagcctcccaaagtgctgggattacatgcatgtgccaccatgcccagctaattttgtatttttcgtagagacaaggtttctccattttggtcaggctggtcgcgaactcctgacctcaggttatccacccgcctcagcctcccaaagtgctgggattacaggcatgagccaccacgcctggccattgaaatcatttctaaatgaaaaagtttaaagaaagtggggagaggaatgttgcagatgacaaagctgtaggcctgcacgggcctcccccaccacttcagcaccagacacctcacaatgggctccatgccctggagggtctgggtccaggactcagctaggggatgccagcctccctgtggctgggccagtcagaccccagcacatggccattcaaccaaagcaacctctcacacttggttgattggtgagttggaggctccagtggcccctgtcagacttgagacctcagacctgcccaccacagccagtttcccacacagcctgggactgactgggtgacggagaaggatccttaccatggaactagccaggtccagccccagggttgcaaagattgatgattggaagttgggactccagcccaagctgggggaggatcctttcccctctgggctcctgtgtttccacctaagcccggctcacccatgagccaggcatctgctggcagatgagaacaagacgtggtctcaggaagtctgcaggcagaccaggagcccaggccttcaaggatgagacctgaggccatgccgcattcctggcctggccatgtctgttcatagaattgcctccacgttagccagccccatgcctccagactctatgtctacacagctcaccttggccatctcggggccagagggcagaagcagcttatgttgggaaggggcatctgagaagaaggtgagttccccatctgcctgggagaaagagacccatgctggggactcagggatcaggtgcatctggcaacaagcacagaggactggctgggcagtgccaggaaggccattgtccaggcccagccattcctggtgtcacgtccaaagctcttctagaaggcactggctttggacccctataccctctattagcacaagggccttgcatcaaggggttggcccaaatagatgggggcttgggaagcaccagcactgtcattcttggctcaaatgcctgcctggcctgggcatcagagtacagtagtgggcaagagaaggaaggtccctgccttcctgaagctcccattctgatggagacaggcaagaaccaatcctagcacacagcatgccagatggtacgtgctcattgccatagagaaaaagagagttccttccttccttcttcctccctccttctttccttcctccttccttccttttttttttttttttttttttttgagatacaatctagctctgttacccaggctggggtgcagtggtacgatctcagctcactgcaacctccgcatcccaggttcaagcaattctcctgccttagcctcccgaatagctgggattacaggcatccgccaccatgtccagctaatttttgtatatttagtagagatggggtttcaccatgctggtcaggctggtctcgaactcaagtgatctgcccaccttggcctctcaaagtgctgggattacaggtgtgagccaaagtgcccagcctcctttttaatttcttttttctttctttcaagatgggggctcgctgtgtcgcacacgctggagtgcagtcgtgcaatcatggcttactacagcctcaaactcctgggctcaagcgacgctcacacctcagcctcctaagtagctgggattacaggtgtgtgccaccgtgctgggctaaactgaaactttaaatgagttgcctgcccgagacttcagtaaagacctgcaggaactgggggaagagtgtggtttgggtatctgcaggggaactgtgagcacaaagaccctggggtgggagctgtgcagagtgtgtagctgtgagctgagggtatgggggtaggcctgggcaagtaaggtgaagcggggagcagtgccagacattgtggggacaccagcatgggaagaccatggatctgtggggcaggcacccccagagatgccaccttgtactcatcctattctgtcctggcccatggttctgcctctccacctgtctcggaaccggggggccgttatggtatctccccaagccgcagttccttcatctgtaaagtgaagatcactactgtgttagtctgttagggccgccttaaaaaagcaccacagtcggccgggagcggtggctcacgcctgtaatcccagcactttgggaggccgaggcgggcggatcacaaggtcaggagatcaagaccatcctggctaacacagtgaaaccccgtctctactaaaaatacaaaaaattagctggacgtggtggcaggtgcctgtagtcccagctactcaggaggctgaggcaggagaattgcttgaacccgggaggtggaggttgcagtgagccaagactgtgccaccatactccagcctgggtgacagagtgagactccgtctcaaaaaaaaaaaaaaaaaaaaaaagcaccacagtctgggctcagtagctcacacctgtaatcccagcactatgggaggccaaggtgggaggatcatgtgagcccaggagtttgggaccagttcaggcaacatggtaaaaccccgtctctacaaaaaatacaaaaaattagctggacgtggtcgtatgcacctgtagtcctatctactcaggggactaggtgggaagattgcctgacctcaggaggtggaggctgcagtgagctgtgatcttgccactgcactccagtctgggcaatggagtgagaccctgtctccaaaaaaaaaaaaaaaaaagcatcacaaattgaaccacttaagataacagacatttattgtcacacagctctggatgctggaagtccatgatcagagtgacagcaggtctgctccctctgaaggctctaagagaggctctgaagcaggcccctctcccagcttctggtgatgccttggctcgtggagcagaattccagtctttacacggtgttcttcctgtgcgcgtatccgtccgtgtccaaatctttctttttcctttttttttttttttaagagacagggtttttctccatcatccaggctgaagtgcagtggtgcaatcacggctcactgcagcctccacctcctgagctcaagtgatcctcctacctcagcctcccaagtagctgggactacaggtgtgtaccaccatgccctgctaattttttaattttcatttttctttagagatggggtcttgctatgttgcccaggctaatctgggctcaagcagtcctccagctttggcctcccaaagggctgggattacaatgtgagccgctgcgcccagcccaaatcttccttttttgtttttttgagacagagtctccctctgttgcccaggcagagtgcagtagtgcaatcttggctcactgcaacctctgcctcctgggttcaagcgattctcccacctcagcctcgcactacaggtgtgagtcacaatggccagctaatttttgtattttttttttttttttttggtagacacagcgtttcgacatgttgccccaggctggtcttgaactcctgagctcaagcagtcctcctgcctcagcctcccaaggtgctgggattataggcatgagccactgtatccagcctaaatgttcctctttttataaggatagccgtcatattggattagggcccacactaacgacctcattctaccttggttacccctggaagaaccctatctccaaatgcagtcacattctgaggtactgtgggtcaggacactgatatatctctttggggacacaactcataacaccaatagaatcaccattgagggctgttcttccttaggggcctcaggctgctggggagccctgggcagggtgggggcagagggacccacacaagagcagagactgctcttcctgggcaggccgggtctctgggcagaggtgaacatccggggggctcttcatgagggcagggcaccatccaggttggggactggcactggtcaccggcacaggacatggtagccactggggcaggtgaatgtgttggcagcaagggcagtgcccccagccgggagcctgttgtcctgactcagaggacacgtatgggatgtggggcctcagtttctcctcaggcctgggggtgcagcctgggtcgcagctgggaaactcttctgagttcaaagtgagccatggaaggctctgagcccagcaaagtggtctgggcaagaaggggaagagacggggaggcccctgctcctccctaggtggactcacatcatgtcacaatcaggctgggaagccctggcgcaggtccacacccaccctgcactctcatgggtctgaaaaggccaagttaggggttgggtgcagaggcttagaaaagtctaggtctcagcattggatatccgggacccccttatactcggccaggctcagggatgaagctccttagagctggccccaaaccaggagctcctggggctgagacagatgcagacctgctctcctgcccctcctaccatcccctggcccccatcatccaacagaagtccaggccagcctgcctcccgctccagtggggcctccattgcgacctgatagacctgtatgggtggctggccccataatcagcatctaccacatcccacgcgcatggggtctctcacagcggcccctgcccatggacagatggactgacccacaggcatccacatgtggtgctgaagaagccrtgaggaaagggggaggtgggaagggcctcgtccagggtgtctggctgcacaggagacatagcagctcccactggcaccctgcatacaagggaaaggcctcgaaatgcgctcaccaaagcctcagagttttattatcaggagctcacattcaggtacagattcctatgaagtttgcctcacctgragggaagagggagagagcagggctggctgagatggggctgccagaggcatggtctccagctgggtaagcgggattctgagagcccctggtgcacacggagcctcctggcacacacaggattgtctcaaacacagaggacctctggcacactcaagggcactgaatctagcaatgagtctgcacttctgttatgagagtgggtttttcggccaggcgtggtggctcacgcctgtaatcccagcactttgggaggccgaggcaggtggatcaccacgtcaggagttcaagaccagcctgaccaacatggtgaaaccccgtctctactaaaaacacaaaaattagctgggcatggtggcacacgcctgtaatcccagctaatcaggaggctggggcaggagaattgcttgaacttgggaggcggaggttgcagtgagccgagatcgtgccactgcactccagcctgggtgacagagcaagactccgtctcaaaaaaaaaaaaaagagagagtgggtttttctcaggtcttctcggtgcccaattccaaatgtggctgtctcctctgcaggagcaggtctgcttgtcaarartccaagcacgcctgtgttctgtggccacaggagaggaggggccgcttttaaatacaagcctactcctgtcgttggaccagaacaaagacctactggccagaagcacatgagaggtgagagtcgcccttctgccttgttcggcatcgtgtgtgtgcacctgtgtgtgtgtgtctgtgcaactgtgcatgtgtgcacatgtgtagcacacctgtgcaygtacatgtgcctgtgtcggtgtccatgtatatgscttgcatgtgtgtgcttgtgcacacgcaggagtgtatgtgtgtgccatgtkagtgcctgtgtacatgtgcaagagtgggctcaggtgtayccacatgttcatggtatacctcggccggtcctagacctagtatcagactctgctgctcctcactggcataaaggcagaccctgaactgggcatggggacacagatgggtaacacgcaaaccacagggccctgatccgggkgatgctggccaagccacgggcagtgcaatgcagtatggcaaaggaaggtttcctgtccacagtgcccctcaaggcagggccccccaggagcccactggccaggcccagaggtggggttagctctgcagtgtgaactcataggttctggtctcccagtgrgagaggtccttgtccatcatgctacgctcagtgaaggtcacgtggccgtccgcmtctaccaggatgatagtgttggttctgaaagagagcagrggccctcgttcacctggtgtccctcagccctgccctgcctgtcacagccacaaatagggcaagaatgcaggcaggtagagttaggaascccatgcctggaggctgtgccaagtcacagagarcagcagcctcagtcttggggatgatgaggggccatcagtggcgtgtgagctcttggctggctccacaggcccacacttgctgagtcctgccaccttcactgggaaccaccccaccctgccctgctctccccgtgtagcatgagccaaggcatagggcagcctgcgggctgaccacacacttcccctttggaggcccaggttcccagacacagccatgcttggttcttccaagaggtcaagctgttgaccacttggggcccaggcctcctctgtctggaaggcttccctcctgtgccctctcttccactgcccaggccatgccagcccacctgaagcaaacattcagcacactctcctctcctccaaccctctctgccgtgggctttgcagacggagggtggccctggatcccccaacagccccagcacaggctggttcccagggcagacacatacgcagtgyaccccgtggggtgggacccagcggctatgcggcctgccagggagtggagttggcacttgccttcccctcacacacaggaagatgagcctatgacagaggaggggctgaaggaaatgacaccctgcacctgccaatgggccagccagccccaggcaggaaaggctggccagcagccaccacccaagggtacagcctgcaggcctagtgccatggtgccggggcgtttgcccgcagggatccaccaatgtgcaggcagccctgaagccatcctggccctgtgtggctgtgtactggctccttaagcccagcctgtggggccccgggagcctgtggtatctgctcaccctgcagctgcgtctggacagggcagaagctctggaatccactcaggcgaggaagaagcctggctctggctatgggcacttggcttctttgccggccctctagcgtgggaggtgggacatgggataggaggtggcgcacccacggtgctgcaatacctggtgccgtagccagggcagcgcacgcacacagccgcgtacttgctcagcatgggctgcacgtactccccaccctggtcctcgatggccgggtctggcagctgcctgcaggatggagagaagtggtggccattagtccctctgtggcccgcccgcagccgggtctagccccagcccacctggtggcctaactggctctggggagtggccggggaactgcaagggttgtttcttttcttcttttctttttcctcttctcttctcttttctcttattttctttttttgaggaggagtttcactcttgtcgcccagactagagcgcaatggtacgatcttggctcactgcaacttccacctcccgagttcaagcaattctcctgacagaagtccactcaagccagccattgtagctagcatcggggctccagccgtcagctgggattacaggcgtgcaccacccagccatctaattttgtgtttttagtagagacagagtttcaccatgttgaccaagttggttttgacctcctgacctcaggtgatccgcccacctcggcttcccraagtgctgggattacaggcgtgagtcacacaccaggcgtgtttcctccacgtttctgctcaaggcggaaaatctccatctacccttaacttatgactcaatcgtggagctttggccccagatggcacatacaagctccctgcctgccccaagaggtgccctgtgggcatttgcctctgtgacagaagtccactcaagccagccattgtagctagcatcggggctccagccatcagtgagggcagccagggccggtcctcggcctgccccagatggcacattgatgggggctgtgtggacttacagctgggaggggctgctgggcatgcccaggtggggctcttccagtgaggcagcgatgctgaggctgaaggacgaggccgcctatcagaggcccagaggagaaggagggtaggcagggggcagaaaggggccccagggggaggagtgggagatggtccatgggkgcttctctgaagggggcaagctggacagggtgggagtggacgctggatcacctgggcagggcagtggtctgacctgggtggggagcgagggatgggtggggcatctcgcccagtgggagaaaggctggcatggcaagcaccaggacccccggctggggcaacgaagaccccagtgcctggcccctgaggggccttgaggcctacgggcaaggaagtgggtgggagctcctacacccaggcagttcccggaactgcaagtccctgcccagcactcagcccagggtcgctggggacagaccgcttgcgggaagcccatcaaccctgagcgtgctgaccctagccactcatttccatgatgtgtctcttccgcctgggtttgctgagtgtctagaatcttctggaacttcccacaagctctcggcatgcagaggggagcatcyatctgctctgggccccacgtggctgcatcragcctctgggygcactgagcctcccctgggcctgggcctgggcctgggcccatcttctgtcatcaaaagtccctggtgttggaaacctcagctggctcaaggggacaggcagggaggacaggatrtccatcagcttccctgcagctggggacccagcctggccacttccatgggcctccyggggcagcagggcctgcctttccctctgccctggtggcggracactggggctcaccccagcaggacccgcccactcacgcctcttcattgttgagcacatccaggaggctggcgatgagcacatccttgggcagsgcctggctccgttccacagcctccaggaagagctgcttcccaaagcacagcttcctccagggagtctccagcagcgcgttgctcagcccgtaggtgcctgtgaggagcaatcagcgggccatgcagaggccctgctgtgccatgtcagggcaaattgccacctgccacccacctaacacggggtacagctggggaccatgaaatcaggccagactgaggccaagccgctccatgctccagctccttccccatgctcattcctgacctgatggcatggcaaggagaggagaactcagcagtaggcggaagcgggcacccacaggagaccacaaggcacagatgcccagcagcctcgatggatggatgaataagaaatgagcaacctgagatctcacaggcaaaggggacagccaagagggaacctcttcacctcacgccaggttggggggccacctgagaagttcaagagtgggagaattagccaccagaggccaggaggcacccaccacaatcatgtccctgtttggggaacccccaacagcgccacacagtgggcacaggtgtaggctgggcctcagcagagcatggcccacctctgcgtaccagccaggccccaggttaggagagccggggggctctgcacagactctgaacaagctcccagagtgttggcagaaggcatggccaacaggaaaagggtttctcatgtcacagaaagtgaagggcagggacttgaggtggagaagcacctcacctcagaggctcttctctagaggccagggcagcaggggtgggcttgatgggagccaagcaccccaaatgatgcaccagggagaccaagacaccaccctctccctgtcagacttccaggagaatatcttggccgaggcatttcccagggagacagcctggctctgctggggcccccagagccaagccgccagccccaggtgtcacagtgctttttccatcatgaacaacatggaagaccattgaactgcatagtcatgggcaaagaagggagttggactctacctgacaccatacacaaaagttaactcaggtcaagagaggtggctcactcctataatcccagcacatcgggaggctggggcaggaggatcactggagcccaggagttcaagaccagcctcggcaaaatagcaaaatagtgaggccttatctctacaaaacataaaagttagctgaacatggtggcacacatctgcagtcccagctacttgggagggaggatctcttttttttttttttttttttgagacggagtcttactctgtcgcccaggctggagtgcggtggcgcaatctcggctcactgcaagctccacctcccgggttcacgccattctcctgtctcagcctcccacgtagctgggactacaggcacccgccaccacgcctggataattttttgtatttttagtagagacggggtttcaccggtttagccaggatggtctcgatctcctgaccttgtgatccacccgccttggcctcccaaagtgctgggattacaggcgtgagccaccgcgcccggctgggaggatctcttaagcccaggaggttgacagtgcagtgggccatgactgcaccactgcactccagcctgggtgacagagccagaccctgtctcaaaaaaaaaaaaatagttaacttaagtcaaaccaaagacctaagtgaaagagcaaaagctataaaactctaagaagaaagtattggggaaagcttcatgaccttagattaggcaatggtttcttagataagaaaccaaaagcatgagcaacaaaagaaaaaaaaagagagagacataggacttaaaaattttaagctttgtgctttaaataagagacttgtagctagaatgaatgtataagtcactcctataactcaaaaagacaacccagtctgaataaccatttctccaaagaagacatacaaatggccaacgagcatgagaatagctgctcaacatcatagccatcagagaaacgcaaaccaaaccacgagtccacacaacttcacacccactatcgtggctatcatcaaaaacacagaacatagcaagttttggtgaggattcagagaagctgcaacccgcatacactgctggtgggaatgtataatgctgcggctgctttggcaaacagtttggatgttcctcaaaaggttaaacagggttaccatacgacttaacaactccattcctacgtattcacatgagagccataaaaacatatgaccacacaaatgctgtgaggtcacactgtgagcagcactgtttccaacagccaaaaggtggaaaaaactcaagtgtccattaatggataaagggaagaaacaaaaagtaccaactggctcgagggttcagggcagctgtctcagcaactccctaaattcctacagctacaagaaaaaccacagtcttgataaactccctcacaayagtagagatcacacacgttatcagaccctcctaactcttgacagcccagaccaccacaaccctgactggacagagaaccagccttcaaacactcttttctgataagcaactacagaccataagccagtttcagcagttcatagaggctgcactccaactgtgtcctagagctcaccttctgatggaaagatccagattctacctcattttaatgctaaaaccctgccccaaagtgaacatgggatgtatgttacatgtatgtttatctattgcatatgttctcgggtcccctcataaatatgtatggcttttccccaaacctgctgaatatgtatgactctaytgtgtgatatggaccttgggaggcataaaactcaaactgcccttcccctcttcaaagagagcacctcagtccatgctagagactctctcttccgggtctgcaaactgatatggcaaataaaactctcctttctatcatttagccatgctggtgagtttttctttgttttttttttttttgagatgcaatctcactctgtcgcccaggctggagtacagtggcgcgatctcagctcactgcaagctccgcctcctgtgttcacgccattctcccgcctcagcctcccaagtagctgggactataggcacctgccaacacgcccggctaattttttgtatttttagtagagatggggtctcaccgtgttagccaggatggtctcgatctcctgacctcgtgatctgcccgccttggcctcctaaagtgctaggattacaggcgtcagccaccgtgcctcgccactggtgagtttttagacgacaacactaagtgaaaaaagtcagtcccctaaactacatattataggattccctttatacaaagtgtccagaataggcaaatccagagacagaaagcagattaaaggttgcaggcgctgaagagacggggaatggggagtggctgctgacaggtatggctttctttggggatcaagaaatgtcctggaattaggtagtgatgacagttgctcaactctgtgaatgaaacgaaacctactgaatgatacactttaaatgggtgaactgtgccgctagtcagtcatatctcaataaaactttatcaaaaaaaaaaaggcaatgtggaccaggtggggcaggctcagggatgaggcaggatgtagacagaaataagttctacagaacaacaactgagcagaaaataagcatctccagccacggaggtctcagcctctgagaaccgaggrtgccacgyggatggttacagcgactgccccagaggccgctgggccaatgttcacagtgagggggtggtagggagtctctgactgcttttgcaccttttagtttccaattctctcctgggcagtcacaggctcagcatggcccaactccactgccacagacctacttcgccacacattccaaccccacgaccctcaactgatgcggaggttctggggcaggtggaacagcaagagctggctgagacagccagaacaatcctttgcaagctcaggaccttctggggccacatccctgcctcgctggtagtctctgtgtctgtgccactgcccagctcttgggagctcaggtgggctgcccacagttgtatccaaggtagggaggggaagaccagggtcacagagggtggccggaaggataagccccaggtggaggagagggcaccagctggtaggcgtgggggcagtgggtgggacacactggaagccaccctccaggcagatgcctcctctggagatcccaactagcccaggggttcgggtctgggcaccaccctagcaaatgggggctgggcctatctgtggatgaaacatcactgggcagacgtgggaagctggaagccagctccagtgtgggccaggcaaggaccacaggactcatgatgagcccgtcagcaccaccagccccctaagatgcaggtgggatggggccactcagctgtcctggggactgcttatcatctccctcgggcccctccagggacgcctggggcttcagttccaccgtgtacacccagtgggaaggtgtgcacctgtgacctgcaacctcacttggtgatttgtgccaaatgcaaaagaaagtctgtgtgacgtgggcatggagcttcagaggagccaggggtgtgagggagccccctcacagaggggtgtgggtggcgctaagggcactgacacactccccaggcgccggaacaccctgtgtgagccagcagcttgagtagagggaccagagcgggcgtttaaggcacagagttccacgatgccaccagcgaggagtgtctgtgggcagcgagtgtgggagtgagtgagccagcagtccccggaacctaggctatggtccctacagttttgtgcacccaggggaaatgccatttcccaggagtgctgctttgtcctggcaccagacctgggacaagatgcagacctccctcccagaacatggctgcagaggggggcaatgtgacacattctctccaggttggggcactggcagaggaagcttccaggaaatcgcagcacccgaggagggggaaaggaagggcatgtagcaggaggcacagcctgggcagtggtgcagagccagggcaggaagggcccagccgtggagtgtgacctggcgcagaggggctcgaggccctgaggatggggaccggggatcagactggggactgggtgcaggaggcgtgcatctgtgtggggcttgagtggggtgtgtacttgtgcgtcagggagcagaccaggcaagaaccccaggtggtgatggctccagaggttctgagaaggaacaggcacagggcacactgggacggcacaggaagtgaggctgggggtggccggctgggctgcagggctgcggtgggaagcccagaacaggggcgcaccttgctcagcaggaaaagcccatggggagggggtgagcagggagccagggctctctgaagygtccaggtgcagggcaaggtgcccacagaccataaggcacttaaatggccacaaagtcatctcagaagagtaatatgacaagtgcctggtctctaaaaagcacaagggtgacctctgcatagaaacagtcccccaccccatcaggctgccagggcaggctcacctggcgtcaaaacgataggatcaggctcccctcggttcccatagtagcaaatgacgtctccctttgctgtgctgcaggccaaggggagagaatgtcagactacagccatagggcgtcctccccgacactgcccggtgatctcacagccctgtttctggaggctagcratgtgcgcagtagcccgctgcggccaggtcaggagcttgcaggacccagcccctcaggtgcctggcaggcggggtcatggaggccccagctcttgtccagcatcacgggtatgttcccagctcacctcggggcccaccagcccaggaggcacaggatctaaaatgccctcctgccatgccgaatgccccatggcatggacacacagaggctgcccatggggacaactgcagggctgagccccatccccacatcaccaacctctccatcaggccccttaccacagctcatctatgagggtttctggacaggtggccccagtgtggccccagggtgatcgaggcttccaaagaaagcgccaaagaccacattttcctactctcaagtgttaagtgtacactttaaaatagttaagggacagtagagctgggcatagtgactcatgcctatagtcccagctaatctggagactaaggagggaggactgcttgaggccaggagtttgaaaccagactgggcaacatagcaagaccccatctctacaaaataaataaatcattttttaaaaagaaaatagttcaaaatgctccccagctgaaaatattccaatcctcaataccacagtaagtcttctagaacttggagtgccttttttgcaaagtgaagaggatctctttgtggcctgtgagatgccctcccaggccagatgctgggcatggagccctgggccttcaagatggaacagatgcagagaaagagccaggcatggtgccttcctccccgaagtgctgcccccaggtgggacccmycttccccacccctggtaggcttcaagggcccccccgtctatgttcacattccactcccgttcttcctcaccatggtctttggcaactttcctaagatacttggttcataatttcagagactgtttgcaggcaaaaatctcctctgggctttctgtgtaaggacctacagaactggacacccatgctgccagcactataccacaggccaggcggagggcaggcctcacccagggatagctgtggccatgacaagcctctctcccttccaggccttggcttcctcatctgcacctaccagcagggctgctcactgacctccgatgcccccgccctccagcctcggccctggcaccagcttttgcctgacctgtggtatgctctcctggccactgcctgtatcctcaggctaggtccaggaggctgaccctcactctgcagcctttggagccgggagagttgcacaggctctgaggagcccaaaccccmamcccccaaccacaggagcccgtgtatctgctcaaggcatggcacccttggcaccccacctccacacagctgctgagtgccaagtcctgctggtgccacggccgcagaggaactctcctgagactaatcagacccacatggaactactgaccgggaaaagtggttcctgagcatgggggcatgcagagagcacaggggctctgccacctggagtcacgaaggcatgggcaggaagaacggctccggacagcaagtgccccgcaccagccctcggccttccacctaggggacactgcaactctcccagcctccatagcaagtgtgcagacccatgtrgggcagggctgggcatgccacacacaagggatgctcaacgaacagcaggcctggagctcgggagccaggagagaggcccatggacctgcccttgtggaaggaggcagcttcagggcccgccacaatgtgccraccacttcccgtttgcctgtcctggcagaaggccccggactaacagcattggccaagttctggggctttggagggggaggagggcaggagggaggaatgctcacttcacggaagggcaaaacaccaaaacctccgcagttcctgcggcctcatctccaacaggagcttccctgggagcacagcatcccagtcactccaagccagggctgcggagggctgctctgcacagcctgcccgtgggagggaggacacccggccagagccactctatgtgactgttcttcacagcctcagctttctccagggatccggcagccctcatgccatcacaggaagccttgggcttcacccccaaatacccgagttggtacatctgtgacaggctcagtcctcagaatgtttgccaagtcacgaggagcaacgtccctggagaggctgccacagcccccagtggaaccccacttcctgatgagcctgaggcctgcccccgaggcagtgctgggcagagccgccatccccctctggcagacccacctcaggtcggctgctatgaggttgaagccattgtacagatggccctccatagagaccttcttcaggtaggacaagctgtccacgtcagtggtcagaaagtgggtgacaagttcacctgtaggcaggggacagatgctgtgtccacagctgcaggcatgtgctcttctcccaggaacactgatatggggccccctggggaggatgcaggaagatgaggggtcccactggagccctggcctgtcatgactgccgcaagagtcagccacacctcattagcctggctgccactcaggtcggcactgaaaactgctcattttattaaaaaaaaaatttccccactatgtcttcctatggaaatccagcatgaagtaaacaacacctttcagtggggacaatgtgtgtccacagagctgtcgtctcggggaaggcatctactctacaaacattccaggcaggggacagtgacacagcagtcaggagtgccatgcatgaggacaaggggagagtgcgccctgagaggagtaaacagtgctgcgtgggtcaggtgggagtgggctcctggctgcgacgccagagggccagggtgtgggaaatgggatgctcccctcctcactcttcctgtctctgccgcatacccctgcagcacacctcagtggcggcagtgatatgcccacggaagccacccacctgccacggggcccagcttcccccttcttgtccccacccttacctgggccctgccctgccacgctttgtcaccgcccactctgtaacctggccctgccccacggtacctcagccctgccccatcccactcccaagcacaagcaccttggcacttcctaccttggcccgccccactccaccatacattggccagtcctgtagtcccttggccccaccttgtctcacctaggcctgccccaccccaccctgtctcaccttggccccaccccactcgccttacctcgccctcgggcctgccagtccagctgcggctgcaggtagttggtgagtgctgccagcttgccacgtgtgctgatgcccagccatgtgcctccttccttgccttcctccatgtccagccctgtggcagatgacagtgttaccaccattgatgccacccattccagtcccccacctggttcccagccctgggagacgcatactcggcccagctcctgcctcaagctcctcgaggacgttcracatgcggcttggcccagcagccccagctatggaatcgtggctggaactcttcaaggccaggcagcccctggggttcatgggtcgtgcaagtgagatccctgtcctgcaggacaactatgacaccaaccacacctatcccaacagatgccctgcagaacacatccttccacttgggccagcgtcaaggctgaggggcagcactaggctccaatcgcatgaatggggtgcagggacgctggctgtcctcacccagcaggatgcaccaggcccaaagggcaggcccttcactaggagcccagcacacaaccaggaccttcacccccgccaaatctgcagggcatgggccactgctaatgccacaaggttggagggctctgaaagccacaggagggctccttcttagaccagggggtcattttacccaaagattggggcaaaaaaggctgtcattaagatgttatttttattattttatttcattttttatttttttgagacagagtctcactctgtcacccaagctggagttcagtggcaatcacacagttcactgcaacctccacctcccaggctcaagcgatcctcccacctcagcccaagtagctgggaccacaggcaggtaccatcacactcggctgatttttgcatttttttgtacagacaaagttttgctgtgttgcccaggcttgtctcgaactcctgggctcaagygatcctcccgactcagcctcccaaagtgctgggattacaggagtgagccactgcactggctaggatgttattttatttattattgttattattactttttgagacagagtttcgctcttgttgcccaggctggagtgcaatggtgtgctctcggctcactgcaacctctccctcctgggttcaagcgattctcctgcctcagcctcctgagtagctggaattacaggcatgtgccatcacacctggctaattttgtatttttagtagaaacggagtttctccatgttggccaggctggtctcgaattcccaacctcaggtgatccgtccgccttggcgtcccaaagtgctgggattacaggtgtgagccaccgtgcctggccctaagatattatttttataacaataattaattataacagaaaaagaaaagatgtaaagatcaaaaataaagaaataaaactgtatttgtggccccgtgcggtgactcacacctgtaatcccagccctttgggaggccgaggcgggcagatcacctgaggttgggagttcaagaccagcctgaccaacatggagaaacaccatttctattaaagatacaaaattagccaggcgtggtggtgcatgcctgtaatcccaactacttaggaggctgaggcagcctataatcccagctactcggggggctgaggcaggggaattgcttgaacccgggaggtggaggttgcagtgagccgagatcacaccattgcactctcagcgaaactctgtctcaaaaaaaaaaaaaaaacccaacaaaactgtatttgcaaccagcaggatcatatatgaagaaaacccaaaaggaataccaaaaccgatgtattagaactaataagtaaatgctagcaagaactggaaagtgagcatttaaatataccatttataacagcatttttaaaatccttagtgtgattaaaaaaaaaaaaaaaagccgggtgcagtggctcacgcctgtaatcccagcactttgggaggccaaggcgggcggatcacgaggtcaggagttcgagaccagcctggccaatatgatgaaaccccatctctactaaaaatacaaaaattagctgggcatggtggcaggcacctgtagttccagctactcgggaggctgagacaggagaattgctggaacccgggaggtggaggttgcaatgagcagagatggcgccattgcactctagcctgggcaacagaccaagactccgtctcaaaaaaaaaaaaaaaaaaaaaaaacaccaggaaaatatttaatgaaaaatgagtgacaaagactgaaaactccagggcactgttgagggtctcaagttgagctgacctgatttaaggagagacatgcatattcactgaaagattcaatagtgtttttttgtttgtttttgttttttagagtcttgctctgtcgcctaggctggagtgcagtggtgtgatctcagttcactgcaagctccgcctcccgggttcaggccattctcctgcctcagcctcccaagtagctgggactacaggtgcccaccaccacacctagctaattttttcatatttttttagtagagacagggtttcaccgtgttagccaagatggtctcggtctcctgatctcatgatcggcccgcctcggccttccaaagtgctggaattacaggcgtgagccaccgtgcccagcctcaacagtgtttcttcttgttattatttgtttcactgggtacttcttagacaactcagtattgttaaggtgacacttctccccacatgacccatagattcaaaacctgcccagtcaaaatcccagggggcttttygttttatagcaattaacagactggctgaaatatctatgcatatgcaaaggaactgggatggccaaaatagtcccgaaaaagaaggcagacccacattgcctgatttcttttttctttttttttttttttttgagacagagtttcgctcttgttacccaggctggagtgcaatggcgtgatctcagctcaccgcaacctccgcctcccgggttcaagtgattctcctgcctcagcctcccgagtagctgggattacaggcatggaccaccacacccagctaattttgtatttttagtagagacggggtttctccatgttggtcaggctggtcttgaactcccaacctcaggtgatctgcccacctcggtctcccaaagtgctgggattacaggtgtgagccacagtgctcagcctgatttcaagacttactaaaaagcagcagcactcatagactgcatggtgttggcatcaagacagatacatagatcaatgggatacaacagagtcaggaatagacccacacatatatgttcaactgatgtacaaccaagttgccatagtaatgaactaggcaaaagataatccatttaataaatgatgctggaacaactagagagatttgggggttggaggcagtaaatctcaacccctacctcacaccatgtacaaaaccttgagataaatcatagaccaaacataaaaacaaaaattaggcttctagaagcaaatggaggaaaatattgttatatattttcctctgggtaggcaaagactttttggataaggcacaaaaagaacaactcataaaagataagataaactgtactttgttaaaatgaaatattctggccgggcgcagtggctcacgcctgtaatcctaccactttgggaggccaaggcaggcagatcaagaggtcaagagattgagcccatcctggccaacatggtgaaaccccatctctactaaaaatacaaaaattagctgggcatggtggtgcatgcttgtagtcccagctactcaggaggctgaggcagaagaatcacttgaacctgggaggcggaggttgcagtgagctgagatcgcaccactgtactccagcctggcaacagagtaagactccacccactcaaaagaaaaaaaaaaaattctgctcaccataagctatcattaaggaaatgagtaggcacaaaggactcatatccagaatgggtaaataactcttacaaatcaataattaaaacaagaacaaaacttccaaattgcccaagcaacaaggaccagatttaccctcctgcataaaacaaccaaaaaataaataaataaataaaactcaagaaacaatggtgtatttattagtccattctcatgctgctacaaggacatacccgagactgggtaatttataaaggaaagatatgtgactcatagttcagcatggctggggaggcctcaggaaacttacaatcatggcagaaggggaagcaaacatgtccttcttcacatggtggcaggaaggagaagttccaagcaaagcaggaaaagccccttataaaaccatcagatcttggctgggagcggcagctcatgcctgtaatgtcagcacttcggaaggccgaggcaggcggatcacctgaggtcaggagttcgagaccagcctggccaacatggtgaaaccccatctctactaaaaatacaaaaattagctgggcgtggtggcaagcggctgtaattccagctactcaggaggctgaggcaggagaattgcttgaacctgggaggtggaggttgcagtgagccgagatcgcaccattgcactccagcctgggtaacaagagcgaaactcagtctcaaaaaaaaaaaaacaaaacactatcagatctcatgagaactcactatcatgagaatagcagcatgggggtaatgccccatgattcaattacctcccactgggtctctcccaggacatgtggggatttggggaactataattcaagatgagatttgggtggagacacagccaaaccatatcaaatgggttttacaaaaaaggatatgacagacaggaaacaaagtgagcccatgattagagaggctccaggacccagcccagggagtggggggaccaggccgaattcagcagactccctgagctgagaagaggggcttagtgtttggggaaactaagacaaccagagttcatggctgccatagtttggatgtttgtcccccagacctcatgttaaaatctgatccccgggctgggtgaggtggctcacgcctctaatctcagcattttgggaggctgaggcgggtggattgcctgaggtcaagagttcgagaccagcctgaccaacatggtgaaaccccgtctctactaaaaacacaaaaaattagctgggcatggtggcaggcgcctgtaatcccagctactcaggaggctgaggcaggagaattgcttgaaccttggaggcggagcttgtggtgagccgagatcgtgccattgcactccagcctgggcaacaagagtgaaactctgtctcaaaaaaaaaaaaaaaaaamaaacaaaccaaaaaactgatccccagtgttggaggtggggtctaatgggagacagatctacctaatggcagatccttcatgaacggcttggtgttgtcctcacagtgatgagttctagctctattagttcctttgagaactggttgtttaaaagagcgtggcgcctcctccctctctctggcttcctccctccgtgtgtgatctgcacataccacctccccttccccttccaccatcagtagaagcttcctgaggcctgcatcagaagcagatgctgacactgtgcttcaggtcccctgtagaactctaagccaaataaacctcttttctttataaattacccagccttgtggatcacttgagrtcaggagtttgagaccagcccagccaacctggtgaaaccccatctctactaaaaatacaaaaattgggctgggggaaggatagcgttaggagaaatacccaatgtaaatgatgagttgatgggtgcagcaaaccaacatggcacatgtatgtatacctatgtaacaaacctgcacgttctgcacatgtaccctagaacttaaagaataataataaaaaaatacaaaaatacaaaaattagcagggtgtggtggcaggtgcctgtaatcccagctactcaggaggctgaggcaggagaatcacttgaacctgggaggtggaggttgcagtgagccaaggtcgcaccattgcactccagcctaagcgacagagcaagactctgtctcaaaaaaaaaaaaaaaaaaaaaattacccagccttggctgggcaccatggcttattatctgtaatcccagcactttcggaggccaagaaaggagggtcacttcaggccaggactttgaaaccagcttgtgcaacacagcaaggctttgtcgctacaaattatttttaaaaattagctgggcatggtgatgtgcacttgtagtcccagctactagggaggctgaggtgggaggatcacttgaggccaggagttagaggctgcagtgagacaggattgtgccactgcactccagcctgggcaacagagtgagaccctatctcaaaaaaaaagaaaaaaattacccagactcagctttttcctttagagcaacacaaacgaactaagacagtggcacaaaagtccagagaggaaggagctacacagagaatgtctgatcagcatctcagggaggagactatatgacactggggcaagaaccaccagtgctcacacagggcagggagtagggctggctcccagacaccaggctggaaaacctcaagatctaggggcaccgagaaaagtacgcagagagcatcgcagaggtgtgggacaagggcaagtgaactaatatatgtgtgtaactggagagaaggagagagtgagagagaagacagaaaaactacttgaaaaagtaatggccgctgggtgcaatggctcatgcttctaatcccagcactttgggaggacaaggcgggcggatcacctgaggtcgggagttcaaggccagcctgaccaacatggagaaaccccatctctactaaaaatacaaaattagcctggtgtggtggtgcatgcctgtaatcccagctattaggaaggctgaagcaggagaacagcttgaacccgggagatggaggttgcggtgagctgagatggcaccattgcactccagcctgggcaacaagagcaaaattccatctcaaaaaaaaaaaaaaaaaaaaagaagtgatggccaaatttttatgaatttaatgattttgatttgcatttcttttcttttttttcagacagggtctcactctgttgcctaggctaactgcagtggctcagtctcggttcactgcagcttctaccttccaggctcaggcgatcctcccacctcagcctcctgagtaactgggacaacaggcatatgccaccacagctggctaatttttttttttttttttgtaaagacagggactcactacgttgcccaggccggtctcaagctcctggcctcaagggatcctcctgccttggactcccaaagtgctgagattacaggtgtgagccaccggcccagggtgatttcatttctaacaagttctcaagtaaagctggtgctacaggcccaaggaccacacctggagaaccactgtcctaaacttttgcatacaatcyggtgacgccagagagtgagaggatgtgggccttagtgatatggtcaccccgacacttggcagaagcccgtgtacatccatgcaccagctgccaccatcaaaacaccacaggggtgaacaattccacaagactggagctgctggggttggcactagttcagaggcagctgacagacctgggtgccagggtgggatggagcccaggagggcacaatagtcaaggaaccagaagagggtaaccctctgagccgccacrtcttcatctatgaaaaccttccaccttccaaggacatcagtcttgtgccttcacccacccgtcctgaccagccctgcacccactgcatcctcctataccagcaggcctaggaccaccctgcctcagtctccatgcacccgtcctcctcccacacggtgccgggaccacccagcctcagcagcattctcacactactgccaggccacaggcctacacaggagtcctcacaaaaccccacagctgagcttttatttgattgattgattgactgattgaatgagacagggtctcgctctgtcacccatgctggagtgcagtggcacaatctcagctcactgaaacctctgctttccgggctcaggmaattctctagcctcagcctcctgagtagctggggccacaggcacatgccaccacgcctggctaatttttgtatttttttttgtagagacagggttttaccatgttgcccagactggtcttgaactcctgggctcaagtaatcctcctgcctcagcctccttaagtgttgggttcacacctataatcccaacacctgccctcccggcctgggaggcagcacagggcacacacagcctccatgggcccacgaggtcacacatctggcctgagtgggcaccctggagcatgccaggatgcctcgggcccacttggcgcctggtacgcaggcagagtaacccgtggcctcaccagccatctatgcgcaccttccaggtagactcccaccaccccatgggcaggaactggttcctgtccaacaggacttcaatgaggctggtatctttggtggggaggacctggttctcacccctacttctgccctataagtacacctaatgcaacacaggcatggtgcaggtgacggggcttcagcaccaccagcttcccaaactcagccccaccatccctgaagcaagggtgctcatatacaaacagaaacacaaacacaggcacacacacgcacgcatacacacgcatgcacacactcatatgactgggttgcttcacaaagtgactgagtgtggatctgtacatcacacaaatccacccacatgccctcagcaaaaaggagggatccatataaaaccaactgatgctttcacatgatggggcccccatgcagacgcatggcacaggaagccacgcagacagtgctgggtgggcagctctggcaatgcccggtgctggggctggccccgaccaygagccccatcagttccacctctacaccccgccatcacacttggaagcagcaccactcagttagggtcactcgggccacgcaggggstagggaagcaacaaggcgcagccaccgctgagcacrcaggaagactcaccactgaggatctcgttgttgttcccccagaagtcagctaacttggagggtcggctgtagaattcatccctgttggctgccaagatgagcctgcaagaggaaagcatcactgatggcttcagatggaaacgagcgagccaagtctttttctcttttcacacacaaaactggcctcagtggcaacaagggccagtctcagagagggcaggaagccggcaktcctgctgcacccacactggaggaaggagcaccgtggctccaggtgagctctcgggagcctgcagctgggaccgcacgggaaacaggaggatgctaggcagggacacacatccacaccattcaatggcgggagacgggtctgccaggcccttaggggcaccatggagcctgggctccatgccgggagcccaggctggagggtggggggctgttcctccttctgtccatctgtccccagccctgggaacacccacaacaaacccgtgggctcttggaagcgtgagctcaaggatacagattgaatggcacagcatgtgggcctctgagggctgctccattctgtgtgttttggagttaatttctcgggttggttgggagtggatgggaacttcactgttttactagtttttttgcattatgaatcaaacaaatatttccatttttatttatttttattttttgagatggagtctctctgtgtcacccaggctagagtgcagtggcgtgacatcggctcactgcaactcccgcctcccgggttcaagctattctcccgcctcagcctcctgagtagctgggattacaggcacccgccaccacacccagctaattttttgtatttttagtagagatggggtttcaccatgttggccaagctggtcttgaactcctgacctcaaatgatctacccgcctcggcctccgaggcggaggattacaggtgtgagccaccacatccagcctaatcaaacaaatatttcttttggaattaggagagacatctaaactttaagagccctggtcttgaggaaagaaaactgactttcaagtcccagcttggacattagaagaaaacaaataaggacacagcrgtgactgagtggaaggggtcagttcctgcaatgtccattagacctgagggtctaagaagcgatggctgggccaggcacagtggatgacacctgtaatcccagcagtttgggaggccaaagtgggaggatcacttgaggctaggagttttgagaccagcttgggcaagaaagtaagaccccatatctacaaaaaaaaaatacaaaaattagtcaggtgtggtggtgcatgcctgtattcccaactactggggaggctgaggcagcaggatcatttgagcccaggagtttgaggctgcagtgaactgtgactgcaccattgcactccaacctggggaacagagaagccctgtctctaaaaaaaaaaaaaaagtgatggctgaagaccccctgagcacttgtgccggagasgcagctccaaggagcagagctcagctgtcctgccatcacaatctgagtctgaaaccaagttgcagtggtgagagcccgacaagtgtttaaaaataatttccatattgatcattgcacatcaatttcataaaacaacatttgctcctgattaaatgtgaaataacagacattcataaaattgggagtgaaagtggtgctcacagctgggtrcggtggctcatgcctgtaatcccagcattttgcgaggccgaggtgggtggatcatgaggtcaggagttcaagaccagcctggccaagatggtgaaaccccatctctattaaaaatacaaaaattaggccgggcccggtggctcacgcctgtaatcccagcactttgagaggccaaggtgggaggatcacgaggtcaagagatcgagaccatcctggctaacacggtaaaaccccgtctctactaaaaatacaaaaaattagccaggtgtggtggcgggcgcctgtagtcccagctactcgggaggctgaggcaggacaatggtgtgaacccgggaggcagagtttgcagtgagccgagatcatgctactgtactccagcctgagtgacagagcaagactccgtctcaaaaaaaaaaaaaaaaaattagccgggtgtggtggcgggcgcctgtaatcccagctgctcgagaggttgaggcagagaattgcttgaacccgggaggcggaggttgcagggagctgagatcgtgccactgcactctagcctgggcgacagaacgaaactccatttcaaacaaaaaagtacatggtgctagcacccaccattcatgcccttggaggcattcacacctgtgtgcacatgtgtgccccccactcagtgcctgcccctgaagcttcttgccagcagaactggggaaatgcttttggtcattgccagkgactgtgccatgccctagagcccttggggtctgctatggaagccttaccacctccagggtgccccattcagcctggtctgacacccagctggccccagggctgcaccaggtctcagggatgtgctgcctggggtagggggaggtggtctctgtccctgatgagcctcagcctttgtacctctaactgccatgtttcaacccagacccagcccaagtctccatgtcccttctgggcagaagtrccccccaacctctgcagcagggatggcaggagagcccaccttccctgggctggacagtgctagtagaaggcagtgcacttgccccagacctggatgggccagtcctgtaggtgcccattggttgtgtcctggccagcgggcaggagaagggggaacaccgcagtccctgagtgctatggtggggatgtgccagggtctgggatgacagctcctccaccctatgggtggggtcaagctccatgtggttctgctcagcattctctcttaaataccttcctcctctgcttccacgtcccacagccctgcaggtgaacaggggtcgggggagccagggacacctcatcccagtccagccccaaaccaggctggggctgttggcttcgggtgctgattctgacataatgctcttacaaagggaaaataaaggggagaaaagtaggaagaaaagctgactgagcatggacttttgtcctaagatgttcagctgtctgtttttaaacaaggagcaattatatatgtttgcctaataactcaggaacattaattgccaggttatttttgttccagcagtcatgtttagctgaattgctggtggtttgccagggatttcattgaatacataattcagggacaagccagcatgctgagcacccagatcaagccccaaagggaggaggaagtagctctctcagtcatcactggtggggctgcacatgggtagaagcctatctgcgccccacgtccagagagacagggatgcacccaccacggtgaggtccctgaggatggcaagtcacctcggctttattttgttccaataactgaaaccactaattatccatcaccacctgacacccacgctgctaggcagggtgagtgcgtgtactgtccggggggtatgtgcatcatctcggggggtgagtgtgttctgccggggggtgagtgtgtgcactgtctgggggacagtttggtgacagataggaggtactctggcctgagatccagtgatcaaaccctcagtggtgaccccatggaagctgtcccatggagtaacagcttgtcctgcagccactctaggctgaagccagcaagtggcatcacgtggggctgtaaacaggcaggttttttttcgttttttcttttttttaagatggagtctcactctgtcatccaggctggagtgcagtggcgctatctcagttccctgtaacctctgcctcccaggctcaagcaattctcctgccttagcctccctaatagctgggattacaggtgtgcgccaccatgccaggctaatttttgtatttttagtagagatggggtttcaccatgttggccaggctggtctcgaactcctgacctcaagtgatccacccacctcagcctcccaaagtgctgggattacaggcgtgagccaccgcacccggctgtaaacaggcagttttgaaagagatagggtgacatcatgaagtgattgtgttatcttgctgcagggtcttggttttccgtgatgggtatcaaattaccaaatacagtggccgaggccgggcatggtggctcacgcatgtaatcccagcattttgggaggctgaggcaggaggatcacttgggcccaggagttcgagaccaccctggacaacatagtgagaacttgtctctaccaaaaaaaaaaaaattagccgggcatggtgttgtagtcccagttacttaggcatgctgaagtgggaggatcgcttgagccggcgagtttgaggctgcagtaagctatgatcataccactgtactccagcctgggcaacagagcaagatcctgtctctaaaataataataataataataaaaaaaaaaaacatagtggcctaaagcaccctactttttactccagtccacaggtgaggagtccagcccagcctagctgggtacctgtacgaggcctcccaaagtgctgcagaggtgctgtcaggggctccatagaagtgtctgtgctcccagcctgcagcgtgcccttcccctggctggacaccccacaggcagagcagaagcagccaccagaagtgtctcacaccctcccatgaagtcaggaaaacacagcgcacatttgctcagtcacccagaggtggcacatttcgtctttggcttagggcttcggaaaatagtccagagaaatcccgaggccaactggaatggcaggacccgcaggacaggtcctggcagcaacacacgggttctgagtgaaagcaagaggggcccatgtcaaccctcctcctctccacccaaggggctgggtggcactgaccagcacccgcaggccagccatcaagcttcctttccagagatgggagcactcrgggtgggttgagtctcttcagcagcctgcaggaggcagccctgaaacgcatacagagctggctggctctcctcagcgtgctagtttcctggggctgccgtaactaagcaccacagaccaggcggctgcaacaacagacactattgtctcgcagcattggatgctggagatccaagatcaaggcrtcagcagggctggctccttttgagggtcttctcggtatgcagacgactgcttctatctctgtatacacaccagcttcccctgtgcgtatctgagtcacccatcacattgattagggcctacccacatgaccttattttaccttcatcttttttttgagatgcagtctcgctctgttgcccatgctggagtgcagtggcgcaatctcggctcactgcaagctctgcctcccaggttcacgccattctcttgtctcagcctcccaagtggctgggactacaggcgcccacccccatgcccagctaatttttttgtgtgtttttagtagagatgtgttatccaggatggtctggatctcctgaccttgtgatccgcccaccttggcctcccaaagtgctgggattacaggcgtgagccaccgtgctcggccagcccctacattctttagagttctgttcactcactagccagcccaacactactccagtccctgtagcagtcaatagttctttcctaacatttcttccaccttccctgcagcatgctgtctgctgctgggacctgccactcacccaactgcaaaaagggaaaacaccagacacccttccttcctgattccttggcctgaaatgacttcactcagccttgaagtcaagcagcatggtgtctatgcaactttgcagtgactcaaatctgagaccctcttgaaatggttcaaatcatttctggtacagattttaaaatgatgaaaacttcccgagcagttgcattagagagtggttacacgtttcattttagatgtgggttatatctctgcctcgttctctgtgtggataaatgctggggtgtcctggggaatggaggtgtggccgtcctgagtccagggtcaggggtggcttctggcctcgatttcctgactcctctggctggtcctcagcgtcccctcttccccaggttctttttcctcagctcaggacccacccacagacccctagcctggccgccactttgacttctcaccagcagctgtgacccgccagcccaagctggctctcactcactgacgccgttgtcccagttctgccgcccgaccctcctcaaagcccatagaactgcagcccacctggacccatgtcactcctctgtcctacctgtggctgccttctgtggctgagtcttcacgtctttgtacattgactggagtccccgccccgagaggcattctgacarcatcccacactgagtgaccctgtcctggagggcagtgccaggcctgtgcagccccgtcctggcccacacaccttcctgcacacagcagcttgggtggcatgagaactggctgggcacccaggaccctgcagggcgcagcagatgcagagcgagggggttacctgtacgcgtttttggaaacagggcgaggatcaaacttaaagaagatgatgcacatggtggtgcagggcggctctgctgacacaggtcgcgaggtctgcgggaaaaggaaaacactgagttgagcggatggcagacactcagggctgccctccgaacctgcaacaggccagaacagagagaaccacctctgtggtgtctgtacyacttgctgggtgtgggggaactggacaccacactcttggccggtgccacacaaacaactcccaaacccatgcactcattggcactggccagactgtctctccaccacctgcaacaccagccctgaacagaagcatcccatcagcaccatggtagtcttaaggcctggacacaccgagctggggtgccgagggggtccccggggggcagcagaagtgagggcaggagccacactgtgagaaacaaacttacccatccaaatctaaagaatgaactcagacccagagaacagcgaaagtgagacttttaatgacagtcttgcaagatcaggtgtcagacaggcacacccagcacagtttcgacaagcaatttatcccctagtacgcaggtccctcccccagttcctcataggccgagtactgtggggtcacaattttcccggacrtcgcctattaattgttgggtaggggcttcaggtgtttttttgggggcttgtcttgctgtattttgttgcagcccacaatgcattgcagtcctagttagctcagggactttttaagtatttaacttacgacctaagtagcaggcaggctgataagaacagacaaaatgagctattttgcaggctagtaaactttcagcttagactgaacttctttggttcgggtgaaggcaactaagtgcggggaaagtggaggccgacaagcacacatcagctatccaagcagggtrgcctagtatatcctgtttcttctgtagtttgctgagctaagccaatttaagacactttgtcttggaaatagaccactgtatacattcttccttcaagactgtcccccacatgcacatctcctcccctgcaacagcaccaamcccaccccacacgccaccagtgggggcagccctgcctccgcctccaacagcatggcccactcacctgggatgcaggccctacaggtcctgctcagcacacacactcgccatcccacaggacccgaaggccccacacacccacagcagctggcatggacacgtgccggggacacgctgggtgactgcacacttagcatacacctygtccccacccarggacctctggggcccagagcaggcagttttccacaatgcaaacgagtgcagaacggagattagattccgaggccacscaagggtgacacccaagttccctgaaatgtgcacatgtgcaatgatttagtgacacggctccagggcagagccagtgctcacagctgggacatgggacagccaagaagctgttcaaatactgaagagacccaaaaagattcctctgagaaaagtctaatgagtggggacggaggtgaagagggctcagtgtatgtgcctccataggcacgggcattagggatggccattggggaccatctgctccagtgaggagctggtggctgtgcagttgaagtattgggatagcaataagcgccacgtgcagacgcactgggtcagggggatgggcagccatttgagatggtctgctggccaccactctgcataggatgggaagctaaagggtgtgttgttgcaagggggccctgtgggaagcagactgtggggctggaagtgggttgggtccccttgccgggtgccctggaagcgcccacagggggccatcatccgagggtgggcaggctactagggscaatccttttggtaaaaacaactcaagatgctggatgaaatatgaaaacatcttaaaaattgccaggagctgatgagctcatgcagcatttggccaacagttcggagagcgtggcccacagaggacagcagaacacagtggccaatcctgcctgagagcgtttgcccactgaacacactggggctcatactctggtggcctygggggcgaaggagacagaagacaaggtccagtcacccccacaggatgaagaacctaacagaagactctcctctaagttaggctgggactccaaagagcgatgcttagggagagatgaactacagccgcagccacccccaggggttatggggacattgcacataagtgaagggaagtttctgagaagctgtggcacagccagccgtccaggtccacactgggggtacaaggacccacaagccaagcacagttttaaggggttccagcactcgtagtgcccctgtgcctgaagttctctctggagaaagayaccttcatcctatacttcaaagaagtctcaaaatcatttttcaaagacmagaagcagtacatagtcagaaagaaccacataatgaaagaagcaccatgagcaagaaccagcagaaagataaccgtacatgcatcatcaaccaaccatgctctgatggcagaaagaaaacagacagctcagaaacatctgcagggcaaaggaagtgatgaagagcaaactgggtttacaaagcagcaaaaggaactcggttttttgtttgttgttgttgttttgtttttgctcctgttgcccmggctggctggcataatctcggctcaccgcaacctccgccccccgagttcaagcaattctcctgcctcagcctcccgagtagctgggattacaggcatgcgccaccacgcccagctaattttgtatttttagtggagacggggtttctccatgttggtcaggctggtctccaactcctgacctcaggtgatccacccacctcggcctcccaaagtgttaggattacaggcatgagccaccatgcctggccaaaagaactcttaggaagctattttagaaatgaaagcttcagtgactgcacattaaagctcagctgtgggtttaagagcaatcaggtgcagctgatgatgcagaaccatcccgaatgcagtgcaggaagatggggaacacgctgggctttgggagtgcacccaaggtgccactgatggggtgggcccagcactcaccatgtggccagaagacacaagtccctttactctggaggagctggtctttcctgcacatgagaacccctggctgcagtcactggagaagccctgccagctggtctctactggaatcccactggcctggagcccagggctgcccaaggcctgctcaccagggacatgctcctctggggtgttagagaaggccgttggtctcaatcaacttcagccgacctcagccctccctgggctgcacgcccagctgctggcaaggccatggatgagggcagttctggccactgatacacgtaggacagacaggcagaaaggcacccccagttcagctgcaggaccccaccatcctagctggccagggtgcrggggcagcagaccagccctccaggcaccagtggcagggagggctccatggtccaagggaaggccataaacagatctccggacagcctggcactggaggtgtgggcgcagagccaagggctgtggcctcgacgaagacgcggtcattgggagggaaggaccagaggaaagccagcccctggggaggggaccatcaggaactgcctttctctccaatccctcgccccctgctcgagccaggcccactgcccaccggcccccaacccagctctagccagcaggtctccccctccccctgccagcttcacctcccccgacctgtgaccttgcctttgcctgggcccctgtgtgctccctaagccaagccctgcaggttccctaggtcctacaaggtccccacacaggcccaccacagcattccaacaccctctcatgcctgctgacttgccaggctctgggagggagccatggatatagtccttgtccttttggtcaccatatcttgatctgggcgcagggcatgtgggcacacgggtggccaggaccacttcccacaacttccacaggtcccatcacaccaggtgaggctgggctcctcagggcatctcttgtgccacacagagctcgccctcaaggttgcccgaattggccaactctacagragggttggtgtcccagggagaatcgtgcctggctttccaggtgaggctccgccctgcctgtccccacccctgccctgggctcagcacttgggccaagcccaaccaactctcagcatgtccttggcagtccaagaaggccagagtggtcaaagccaygcagggttggccctgaggcccaggcggccagaaccagaccacaaagagcagctggaggaagaggcaggcaggagggtctggggtccagtcagcagccttgccctgggtctcagaggccacagcccagaagcatctgaacatctgcaggaagccacgcccagtctctgcatcctgcacaggaccccgcctgccccaaggggctaagaccaccagggcagcctgcacacaaccaccaggcttgcagaagcagtcagatggccacacgcccatcctctccaggcggaaaatgcttacccctctccatyctgtcaactggcctcacggccaccgggatagcagttgggcaagtaggttacagggcgggtggggcaggtgacgcaaaacctggctgccagggcgggtccaaccccaaccggaaggaggctgggccagggcaccacaggtgggaagatgctgatgagctcctccctgtgctgtgtgctctgcagctgtgatctcatctcaagagtcccaggtcacatggcagggatgggcaaggtgagcctggaggggctcatggtggggcacctgctggttgggctagaggtgaagaagcagtgagctggccaccccgagcaggcacacgtgggatgctgggatcaagtgggcctgctggaccctgcacccacggcctggcagcccctgagagagtcaggatggcctcggcactggatctgttcatttgtagctctgctctgcccagccacgctgtggacactcctggaagtcagcatgctgccttctgctctctcatagcaggatctgctgatccccgccagggtgcaagaggtccctgggcaagctggtgatgggcagccagcttcctcctggccatggtggtcactgtgttcacatrtggtcctactagaaacatcatcttgaaagcaactggcatgacacaggcacatggccaggcctcaccaggcccacagggatggaagagcccagatatgtagcccaggctgacaacaggaggccgtgtgggcagcagtcgagaggagccatacttcaagactgaaagcagagcctgtgaggtgggcaaatgtcctgccaccgacctacgacaccagcacagcgcagcagggcaacgtggcatggtggtgaggttcctgagccaggacaagaaaagaagcgttgttctcatggctatttgaggaagcacatcacctccactctgtcgcccaggtgcagtcgtgtgatcatagctcactgcagcctcgaactcctgggctcaagccatcctcccacctcagcctcccaagtagctaagattacagctgcataccaccacacccggctaatttttttttttttgagacagagtctcgatctgtcacctaggctggagtgcagcggcgcgatctcagctcactgcagcctcctcctccctggttcaagcgattctcctgcctcagcctctcaaatagctgggactagaggtgcgtgccatcacacccagctaatttttgtatttttagtagagatggggtttcaccatgttggccaggatggtctcgatctcctgaccttgtgacccacccaccttggcctcccaaagtgctggtattacagacatgagccaccacgcctggccctaatttttaaatttttttggagaggtggggtctcattatgttgcccaggctattctcaaactcatgggctgaagtgatctttccacctcaggaagtcttaatgactgggtagtataagtgacatccttttaaaaaattttacagcaactgctggttgggcgaggtggctcacgcctgtaatcccaacactttgggaagccaaggcgggtggatcacctgaggtcaggagtttgaggccagcctggccaacatggtgaaaccccatctttactaaaaatacaaaaattatcacgcctgtaattccagcactttgggaggccaaggtgggtggatcacgaggtcaagagttcgagaccagcctggccaatatggtgaaaccctgtctctactaaaaatacaaaaattagccgggcgtggtggcgggcgcctgtagtcccagctacttgggaggctgagacagaagacttgcttgaacccaggaggcagaggttgtagtgagccaagatcgtaccactgtcctccagcctgggcaacagagcaagactccatctcaaaaaacaaacaaacaaacaaacaaacaaattagccaggtgtggtggtgcgtgcctataatcctagctactgaggaggctgaggcaggagaatcacttgaacccacgaggtggaggttgcagtgaaccgagatcgtgccattgcactccagcctaagagacaagagggaaactccatctcaaaaaaataaaaattaaaaaaaaaaaaaaaaaaagcaactgcttacacgagaatgccctctttacaagagtcctggtgcaccctgggaaggaaatgcgctggagtgtgaggcactggttctctggtcatacggagcggctggcctgtaccactgyctcctggagcacatagggacttggtagacaagcaagggacgaaaggatgtgcgtcgtgaggctcatccatatctgagaaagtccagctcctctcacacagatgtgacraaagaggtcgcctttgtgatggtcaacacttaaccacccccagtagagtgccatctccagttgggccaggcaccctgcctccctgcagcccagacagctagagtgaatgcccaggggacatgcacagcctctgtgcagggaggccggggaactaatcacttgggactttggtgtggyctttgccaaccctgccagggaggtaagagggggacagtcactgtgagctcaccatgtgactgcaaatgccaccagcctcagcagggacagagcacaggcctcttccagggaggaagttccccccacactcctggagtccctcaacacccccaagcctggccagaggatctatgagatatgaatggaaagagagagccctcttcacaccgcagccaagggcttcccgtcctctaagaataccagtgcgggtggaattcttcccagaatcccagcatacgttcccctagcctaacaacytggtaattctgcaaaacaggaagaaagcctggacttggcatgggttattcttagagcatggcgctgtctgtgaaggacggaagctttccaggcactctgggcccatctgctgatgctttcgagaactctcccagcgtgcaccgtcctctctgcccaccttctgcttctgagagccaccccgctctagaatcccctctccagcctagggctcctcccctggcttctcagagaaaccaacagggccttctgtcctaaggccaaatggaaacgggctaaactccctctctaagaagaatgagactccagttgaggcaagccccaaacctcactccatgcggtgtctaaaaaaggcacgacaagaaaaccattcagacagaacgcctgggcaaagatgggccagagccacaggcagagagcagcagcagcagtgaccccagccagggctgcgtggggacaaggtctggcaccctgatggatgcgcacatggcctgctgcctggcagtgaggatctgcttccctggctctcagtgcccaccacaggcaggtaggtggggtggagggtgggcagtaaccttgcagaggcccatggggaaaagaagcaagggggacgagggccatgctgacagggcctcaaatggaggacccagtggggaacaggcagacctcagtgctgcagggcaaatccaggccaccctcctgcatgtcccagaacccactactgccagcctccccttctgaggaggccaacaggcatcaggcatctgaccgtgccagtcgcccaccccacaccaaccagcaccacctccactagcttttgtataataccaagaaacgctggtccctcccatacgctgcctgttcattcaccctctattcagcctctctgtgccccagcctaaggctgagtctcctgtagccacgactggcagctctggaggctggtgggacccatagttgttaataccatcgctcaggtcacccaggagcacattctggrgggaaacatttccagtgacatttaacgggccaaagccccatcccttcagggctcatgtctgtcatcccagcactttgggaggctaaagcaggaggattgtttgaggccaggagtttaagtccagcctgtgaaacacagcaagtccctgtctacaaaaagcaaataaaaacaattagccaggtgcagtggcatatgcctgtggtcccaactacttgggaggctgaggtaggaggatggcttgagcctagaagatcaaggctgcagtgaattatgatcatgtcactgcacttccgcaacacagcaacagagggagactctgtctcaatataatactaataatataataaaataaggtagggtgcagtggctcatggctgtaatccctgcactttgggaggctgaggcgggcagatcatttgaggtcaggaattcaagaccagcctggccaacacggtgaaacccrgtctctactaaaaatacaaaaattagccaggcatggtagtgcaggcctgtaatcccagctactcaggaggctgaggcaggaggatcacttgaacccaggagccggagggcgccgtgaaccgagattgtgccacttcactccagcctgggtgacagcgcgagactccgtttcaaaaaagtaaagtaaaataaaataaataataataaaataaaattagccgagcatggtgacatgcatctgtagtcccagctactcaggaggctgaggcagaaggattgctcgagcccaggagtttgaggctgcagtgagctatgatagcaccactgcactccagcctgggtgacaaggcaagactctgagtctcaaaaaaaaaaggaaaaaaagcctcagccaagggctgcctgtggcgccagagtgttcttaacctgcttgcacacacatgtgagcagacacatgtatgctgtggggttaacacgctagggtcccattgctccrttctccctgattggccatgaggtctgtctccaccagagccatgtccccactggttcaccactgcccagctttcccgctgctctgcctctcagctgtggctggtgtcttcgtcccatcaagcgaccatccctagcacatgctctgcacatgggctgatttggcttggatctgtgtccccaccaaatctcacgttgaatttaattcccagtgttggaggcaggacctggtgggaggcgattggatcatgggggcagaattctcatgaaagtttaacaccatcccccccggtgctgtacagtgatagagttctcacgagatctggttttaagtgtgtggcacctcccccatctctctcttcctcctgctccagccgtgtgaagtgctggctcctgcttttccttctgccatgattgtaagtttcctgaggcctccccagaagctgagcaaatgccaggatcatgcttcctgtgcaccttgcagaaccgagagccaattaaacctctttttttaataaatgacccagtcccaggtatttctttacarcagtgggagagcagctgaggacattcctaggatagacgcaagaggtggaattgctccatccatgggtgrcgctttcagataaacagacttggccaagtccccgctaacgtctagcaccagaacctgttgccactcacctgcctccagggtgtatgcagtgtgggaaatgttcccgccagggttttatgggcatcccccactggctgggcaacttgtgacctcctgtatgttcttgccaacaattcaccaacatgggtactgactgctaggcctttgtctcactgacccgtagtgcagctggtgtgatgtgggcaaccatgygcctgtcccaggcctgcaactgttttctccctagccatcccctgcctttcagctctgcctgtgatgctgtctagtagaaatagccttatattacatgggattttcccatcattactgtacagcagtcatgtcccgtcctgctaaaggccctccctgtcccaaaatgagaactcctttttcttatctaccttgtatggttgcacagtggtgaagctcttttttttttttttgagacgaagtctcgctatgtcgcccaggctggagttcaacggcgcgatctcagctcactacaacctccacctgctgggttcaagcaattctcctgcctcagcctcccgagtaactgtgattacaggtgcgtgccaccatgcctggctaatttttgtatttttagtaaagacaggttttcaccatgttggtcaggctggtcttgaactcctgacctcatgatccccccgcctcagcctcccaaaatgctgggattataggcgtgagccaccccgcccagccttggtgaagctcttggatctgcccactgtctgcctgtgcgactgctgtgaggtggggaccacccatgcttcccaaacgcacagccaattgtccttaggtggccgctggccatccagtctggcccacctcagccacatcctggacttctagtcacatgggccccttgaggccttaaatgtgtcaccaggcctctgatgctgcagtagtcaccctagcttcaatgcattctcaggtgtctggagggcaccctccagactgtcccccttggctattcaaagaaccttccaaaccctgcctagatcacgccatgccccaactcctgctcaccatgccaggcactctgcaggtgcccaagtccacaaagtgacacagtaagaaagtccataacctggaaaagaagccagcctgtgcctttccayggtgatgaggcagcagggaggtctcagccagaagatagcactctgcttggtctttcatgcagaggccagagataagcaacatctgcccatggggacaggaggcagggcagggccacctggtctaggcagccactgggggacacgagggagatatctgggtgctggtggtggtgtgatatggacggtagctgtgtggctgggttcactttgtacaatctgtcacgccagacactgaaagcgtgcacacccagtargcatgcttcccggcggggaacagtaatgtctaccctcaaaagaaagtgcactggccaggcacagtggctcacacctgtaatcccaacactttgggaggccgaggtgggtggatcacctgaggtcaggagttcaagaccagcctggctaaaatggtgaaaccccgtctctactaaaaacacaaaaattagcagggcgtggtgatgcacgcctgtaatcccagctactcaggaggctgaggcaggagaatcgcattgaacctgagaggcagaggttgcagtggcacgatctcaggtcactgcaacctctgcctccggtattcaagcgattctcctgcctcagccttttgaggtgacaaagcaagactctgtctcaaaacgcaaaaaaaaagaaaatgtacagatcctgccctccttccctgccagggctgggacatttctatgggcagggaagagagggaaggaagggcaagaacccaagagtcacttgttcacagaaagcaagagaagacccaatcagccctggtgcaagacagctctgcataggacggggtgtagctgggctgtcgcagcaacaccacacctggagaccctgggggccagaggggatgggacacacgcttttggcggaaccacttccctttggcaagcgaaaaggcaagcatagcacatgggcagaggggaygtgtgctaagcagaaagcagtggtgacagaggaatggcaagctattagtaccacagggtcaaggggacctagacacttgggagggtagccatcaagtcgggctcctattggggctgcacatggtgagtccctgaacagagggtgactaagccctacagtctgctgcccccatttaatggcctcaatggccacaagggctggtgctgcagggctgagcagccgggcgcccaatccccatcccttgtaatccccactccatcagcggtggcagcccccaggggcagagcttgaaagcaygagttgctcttttcaaaggcagacacagacatgtgacgcgggctcccggtggctgtcagcagaggaggtaaacacacgtgggaacacagtgtcgctgttcacggggcctgggcgaagaaagtcctgacgtcaggaaaccctctgagtctccagtccactgcaatgccctgctccctcctatctccgcagcaagagctcaccagtttacactctctggctattaaatggcattttttatttttatttttagatggagttttgctcttgtcgcccaggctggagtgcaatggtcctgttgggtgggctgggggcagctggagagggtgacctctctcactgcaacgttcgcctcctgggttcaagcaattctcctgcctcagcctttcgagtagttgggattacaggcacctgccaccatgcccagcaaatttttgtattttgtttttagtagggacggggtttcactatgttggccaggctgatctcgaactcctgacctcaggtgatccacctgyctcggcctcccaaagtgctgggattataggtgtgagccaccgtgccgggcytaaatggcattttattatgacacattttctttttttttttttgagatggagtttcgctctgttgcccaggctggagtgcagtggcacgatcccggctcactgcaagctctgcctcctgggttcacgccattctcctgcctcagcctcccgagtagctgggactacaggtgcctgccaccaccacgtccggctaatttttttgtatttttagtagagacggggtttcaccgtgttagccaggatggtctcgatctcctggcctcgtgatccacccgcctcggcctcccaaactgctgggattacaggcgtgagccaccgtgcttggcctatcatgacacattttctacagtggtactctctcctcagatcttcacaatgcttccggggcatttcttcagcctcacaccagaggatcactgtctcttcccagttccaaggaatagcacaaacaagaggcatcgtgagcagacagcaagctctggacacagggtggccccatcctcaggccctcctgggaggaacactcagcttcctcacaagccagggacaggccagcctcgcagcggcccctgyggcctgagtggttagtaaaaacaaaaaaaaaggggggcactcctaccatgcccgcaaagaggatgaaggcaagcacttcaagtttcaagttagcatggcactgaagatctcaatggatgyacccccaaatgtcagcaagtgcaccaggggagcagccgctgggagaaggaggccagccttttttatctttaagcatgcataaactatttttgcagtctaaaagggaagttgagagaaaaaggggaaaaagctgtgataacctcaaaaagcagctcagtctttctggggtgaccttgttttcacggagcccatcctcatggtagggataggcttgttttcaagacagcccaagccctatggtaggggccaacaaaggccaggctctgccatgctgctgccatgtgctgactgacacgtcaccaaaggatgggccctgcttctcatgcatctggagtgtcaatgacaagcatggccctacttcgagaagtcttcccagcctccctatcccgggccatttctctccagaccccttctggggtccctgagaagcccctcatatccctgtgggtgttttcagaagcagcacccttgggtgggcaccggggtgccctccaagttcgccgtctggcgcagaagccgggcacaggatcaagttcccaggacactgcacgtgattccacacactgcaaaacgtaatcagaatgacagcccacaagtgaagaccaaggaagcacaagaggctgggcagcccaggaagagctgacagctggtcaccttagctcagggaagggctatggccaccacacatcacagcaggcaggggcttggtctgaggggcctgcagtctgaggacatgcaagtaacacaaagctgtgtaggggtcaaagggggtgggggcaccagggcaccctaccctggaccrccagagcactaggatcctgtgggaacagaggctctgctgtgtccatctaacaacatggtcaccctctccagctgctcccagcccacccaacacagacgcaggacacagacacagggacactcctaagagagtggcccaggagtagtagaggcactgggagcaggccctggctctgaatgaccttgggaacacgatctgccaccttagcctgagttttccttgtatgagcaggactggatcaatgaatgmttgccccaaaaggctgcccagaggcaaatgagctagcgtgagaaagccttccaaagagctactcagctacccccttatagctgccgtcacatctgcctcatggaagagggcactgtgcccagagtggcagcaaaacagtggtcagcaggtctagagccacacgacagtgcaaacaggcctggccagggcagggcatgtgacattcctgaagaggaagggggcctgaggcccagggacttgtccaagggcagacggttcactctaaagcttgtggtccagcaggaagccaagggagcacaggagaggtgctaggggcagggaaggtgggggtctcagcaaacagccctctgtgcccacttcctagaggaaaacgggcaaagcccaggctgctacaaagcccagcggtggggcaaggactgccctgagtgcagccctgccagcccctacctctgacgctctggagttgggggtgggggatctaactacccaaacctccccaggaaggccgcatccaggcgcagggatgacccagcacttactatctactcacacccacattagctgtcaccctgctggcccgcagcaggccgcgggtaggggrcagagtgaccgggcgccagagctgtccctgatgctggccaaggccgagcagcccacacaccctgcagggaccacgcagctcccaaccctgccgatctcagcctccccgcagcgagtctggtcccacctgccagagtccctcgcatcccgtgccagcggggattatcaaaaacaccttccagtaacgcgcggggcattttcgtcggccgggatcgacgtggttgcccctgacccagccgcctgattctataccatacctcagaaaggggaaactgaggcagggtgaggaagtgcggccagcccacccaccttcaagcagcctggcccggtccgcgcacccagagcccagagcccggagcccccgagcmcaggccggccgggccactagcggagtcggccagccccggagccgcgcactcaccgcctccgccaccgccgccgacttccgggtgccgcgcccgcgcgccaccgcagccagcccagtaccgcccagcccgaagccggcgcgttcaccattgggccgcgcagcgaggggcggggcggcgcgccgcatgccggcgtcccgttggctgggcgcgctgtcgctcggaggctgccacctcctggcgccccgcccccggggctgcgccaaagcttcgggctgcgcgggcgtctgagcgcttcctgatccagcggccttcggggactccgcggctccctgcctgcagggacgccatgggaggtcgcagccgcccctgagtccatgccctcatggacaccatctgtcacctgctcaccctgcggcctctctcggaagaggtacaggaatgctcacttccggactggccccctcagactgcgtcctggtctccccatcctgttcactcaaccccacctctggacctggccatcttcctcttggtcatcccttccttcactttatggcctccaggtcggctctttcctccctgatgtccctgccattcccagtatgtacccccagaccctggactaggcatttgagcactataccctgcacacccaccacctcccccacttccaccccccagtgtagcctttgagctcacatccaggtccaggccccagcgacgaggggctggcccagcttgacttgtgcagggtgagcaggtgggcactgactggggccctcccaacaggacagaggcattagctgggaccgctgctcctgtagcctctgggctgtgcctgggcctatgtggcagaaaggtggagagtcaaagcccagaggctcaggccctgcctcaaagtgagcattcaaaaaactatgacatggatgacaaagacattagggataatgataatgtgtaaagcactctaaacccaatgtctgggtcagcagttctttcatcccactttatagatgtaaacactgagacttggagcagttatgtcattcagttgaagttgaaaaaggtggcaagcaagagaggccacattagcttcaacctgtgttgaagacctaggtgccctgatgccctgcagaaaactggggctcagggatgggaagagcctggctggtaatcagcaacggcaagagtctaacctggacctacatgcgggcccgttgtgctccacacttttgctatcttatctgtgtttcccctggaacccaacagaaccttttacaaggactccagatgcccagggactcatggccagcgggccgcagacccagccagacatggttgtctctcccaccatccagcagtgggatcatgtggggctggtaccagtgatttccctctgagcagccaaacctatgcaatctatagggccaagaggtggtggtggtggacaagtgggatctggggcttgggggtgatggactgtgccctggggttcatggcagcacctggagaatgggcttccccaaagcaccaggccatgcacctcaaagctggacatgagttgaccaaggtttccctttgcccacaaagagggatgcagtaacatgtcagatggtggtttgcatcctgttctgtcataccttgtggccttgggccatccccacccccagccatacttttcccagctagacagagccagagcagacactctgatcttctttgtcaccactgacactccagtctggatgacatgcgatgccaggaagcaggtgacggcagatgaaatgggtctaggatgggcacctaagccctgggatcttggggctgcaacaggctcactggcatccaacctctaattgcacacaaactcagataggaagctcactaccttctgtggccactcttttgatttcaacagctgccactcttgaaaagttcttgacacccagctgaaagcattttctctctgtggctttctccgggggcctcacagctgtccgcatggagctaggtgagaggatgagagagggagaacactgggctactggtccctgtggtctcccttgctgtgtttttcttatctttttcttttttccttttttttgagatggagtctcgctctgtctcctaggctgctgtgcggtggtgcaatctcagctcactgcaacctccgcctcccaggttcaagcgatctcctgcctcagcctcccaagtagctgggactatgggcgtctaccaccatgccccgctacttttttttgtattcttttagtagagatggggttttgctatgttggccaggctggtctcgaactcctgacctctggtgatttgcctgccttggcctcccaaagtgctgggattacaggcatgagccactgcgcccagcctcccttgttgtgtttctgacccctggctgcagcctaatgggccgactgctggacagcggtcctgagtcctgtttgaattggtgctgccccgacatcctctgacctcagctaatgatcctgcctgccgagggcagacaggtctctgcaaccctatgggtggtaggggtggtgatgaggggagaggtagtctcacttgcacagattttggtgtatggttctgtcttttgcactctttcaacagaggtctgtccagtccctcttgcaagtgtggggagggggtggtgcaggactatgaggtaactgtgagaagaggggctccagcagaaccagggtccaatggccttgaagagatggctggggacagctggactcattacgtctactcctaaatggaggaaacgacccctcagctacacagcacctgagccagaatgtcaccatggtgctgctccacaggatgacagctacctggtttgtgagggcccctattctagggacagctacttcattctgccctcccagagcagcaagcaacaaccctatgccaggaggccaattggcacgtcaagtgccagctccaatcgattgatagtagctgcctggctctgaaaggcagctgggatcgattcaccatgctgccagcacacagatggacccagcggtggtcccagcagtgagttcttgccttgggccatttcattttctttgtcctggccaaggaatgattggatgaacacactggactcccaatatgggtggataagacaagagtgtctggtcacacccctccaccactcataagcatggttgtgggcagtttggttccccaggcggccttggagaatgcaatgagccgaggaactggtcatctccaggtgcatccagggcaggaaaggatgacagcatgcgtgagccagggtcactggctaagaagtcatctcaggacctccccctagaaaagcccactgggcagcatccctgctggttcccccctacaccacaaggttacgcagagctggcggagggtcatggtcccactcatgtcaggtgctcttaatctggaaaggaaatgtaacctacgtgaatctcaacaggcagtgaagcaccgtttcttcctgactccaggtagggtgaagaaaatgggacagtagtacggggtgcgggcataaacgcacaactctgcctccccagacgcagagctgtggggctgtgagaatgccaggaggaggtaagaaagggcggccccatggggggcctgcagggtgggacaagcccaagaggtctctacatccaggcctggtgggggaggtgagcccctggtttaccgagggggtcccttcctgccctcggaaatactgcagctcctacctccatcgtctccccgctgcggggacccaggggcgtgaggatgagagagcccccaggccccagggtcagacgactgtgttcaagcaagtgagaacctctctgaggctgtttcccaactgtaaaatggggatagcagcagaactctctctcgcggcttgcgtgaagaatacaattcgatgtcgacaggagggagcggcgcgcagcgcgcagcgagtagcaggcgctgaagaaggatacctgtgaactggaagtggtggcggaggctacgcggccagagtccggggaaggggcgccggctctgccagtccctgctcggggctggatggtcgggggatgttctcgtaagtcggctgggagggagcggtcccgcgtaccctgccaccgccgccgcagaggttcgggcaggtgcggggccgcggcccctccgcgagggggccggtcatccgccgggactgacatcccggaggcccaatggcaagccgtcatctccgcgcatccgcccaatcggcgccggttgccgtgccgcgccgggtctctcgaccaatgggaaaatttgctgtcagatggggcggggcggagattcgcgtcgccggcccggtccgctttgcgcacgggccgcgtgagggcgggagggctggcccggggtctcgggttgcgcgctgggcctggagggagggggcggcccccgcaccggtccgagttgcggccgcgtggactgcgacccgcgccgcgccgcaccgcgccgcgccctgggaacgccgctccccgcgcgccaacggacccggggaagcccttctggggtccgaggccgcgctgcggggccgcccacgctgcgctccaggtaagcctgagccagtgggcggggtgtgggacccggggctggggcctcgggtcggagccgggactgggggcggggctgcagatatgggacgcattccgggcagcggtccggacagggtcctatccctggagtcgagatccgggcgagggtctgggccggacgtcggagccaatctccgccccacccgcgtcttgtccgcgcgctctgcggcgtccgagaccccgggccggcgggggcgggtctctttgtgcgtggccttggggccctaccctacccgtccgggcgtcttgcactgagcactccagccgagcgcggcccgaccccgcagccgtgcccgccccgcgcgacgcttggcgcctagctgccagggccctgcagccaccgaaactttccaacagcccgaggggcggcaggccgggaactttcctggggcagcgcgccgccgggaagctcaggggcaccgacggcccggaggtgtcctcgcgccgcgctgctcctgccgcctcgggggtgagagagggcgcgccacccggacccccggcctgggtccccctccccacgccgccctgcgccccctcggtgccggtgcggagacatgtcatctccactctgagggagactctgctcggtttgctggggagtcgccctgggcaggtggcctgagagctccagcctattttaatttttaaataattaaatattggctgcttacaatatttcaccgtttcttagctatgtgtaatgtaacatacttaaaatggaactaaaggacttcagctccctttccctacatccaggcatatttagaaataaggaaaagaaaggtgccccgtgggtattttttagagtaggctcttaatgctgctgtctaataacctcaggtgagtacccaggctgctgtgggggaaacctcccctatggtatgggccaggggggtgcagtgggagcctccacctctcccgaccttagcttctctggggtagctgcctttacttcttcctacttcttaactactgccttatctgcctttactctgggatctgggcggtgtttagaggtctggtccaaacaaggcaggtgttacctatcttgtactcactctattggagctgggatggtgctgaatgcaggggggcagtcagcgctctcttgcccggtgtgccatgccagtggccggtcagctcctaagcaggtgatccaggccttagatcaggcgacagtgtgagccgcagcgtgtctgggaaggcatttcccccagtcttgccccatcctatccgcaatgtctgctcccagctgtcccctgtccccaccctacccccattctggggtccaccagcgcccagcagaggactgggcacagaacattcgctaagggactcaagtcccagctgagagggtagttgagcacagccaagccagcccctgcccagctcttggctgagctgccctgtcaggcttttcagcataa

SEQ ID NO: 97066 - DNA, 12697 bp, Homo sapiens
taaatgagccagcaatcattcaccaagttgtttgcaagatgatgaacactatattagacgcttagcatatgatgcttttaataatctgttgcaaaggtatgtctgcattccttgaacctttatattctttcaaagcctaaaaccctttacaaaggtttgccaagtgaatttttaaatactgtctttggaaggctaagaaatgacaacagaaatgtatttatccagctgtaagcttatattacactaatcttgattaatcttgtattttataaaaggtcctttatcaagggctttatttttaaaagacaaaagcaaaacaaaaaacatatttgaggctgggcacggtggctcacccctgcaatcccagcactttgggaggccaaggcgtgtggatcacgaggtcaggagatcgagaccatcctggctaacacggtgaaaccccgtctctactaaaaatacaaaaaaaacaaattagccaggcctggtgggggacacctgtagtcccagctacttgggaggctgaggtgggagaatggcatgaacccaggaggcggagcttgcagcgagccgagatcacgccactgcactccagcctgggcgagacagcgagattccatcttaaaaaaatatatatctatatatatatatatttgatagcagatatttactatattttgcagaacaaaaagtcacagagctttaaaaaattatgcttcccaacaattatgttccacattcctttccttaaaatttctctagtacttatatcttccaacatcttctgctctgattgcctatggacagtttactacattattttttcttttattgttcccaaactgattaatatatgtgtcattcttctctactacgaggcatggccttgcttgctaggatccatgcatgtcttagatttactttcttctccctcaaaaccaggcttagcacatggcatgaaacagaaataaccattatttcctgtctagaatcaaagagagaaagagaaagaagaataaacaaacaaaaagaaccagacgaatgaaatcaatactgctaatgttactgatatctacaactattacaccgacaaagtacctttggaatgtaattggcaaactggatccatacaactataataagttgttgttttgtcctttaaaatacttaacatgtaaccttttatctttagattaatccttaatcctgttaggtagatagcaaactagcaaacctcttaatatcttcattttactgtggcccagaaatttgtggaatcttgtacaaggtcaaatagctaagtaaccgagactagctatcaagtttttatcaaatacctaattaatcccagactcctgacttcagcatggtactttttccacaagtccatgaaatgacaaagtctaaagtcataaatcaagtgacaaagaactcaaaattacctctgagaattctgattctgtaaaatcgcatgatatgaaagtctatcattttaaagacaagtagaaggataaattattgcttggatttaaattttaatttcacccaattaaaatggttaggggatgggacttttcaagaaaagacttaaaaagactactatgccttttaaaaacatgtggatggtgtataaattaatcttctcatcaaattccaaatatcagaaccaaagatagtttcagaacaattagaagttattactttttctatttccctgtcttccaagtctaactcaggagtcattttcttcaagaggacttcttaactggccagcccttggtcattcctctttcctggcacttcaactgccttgtcagtcgactggaataagatacttggtcttcgtttctatgtgaacatcaaatctcttcaaatagaaaggaagatcttttatattaatacctctagagccctggtacatggtaggcaatatttctgaagaccacgacaatgctgttacagaacttctttcctcaatccactttacaaataaaagtgtaaatattcaggaaaaatttaaggacactaaagatacatttgtaacccattattaataggagtctaggctgtgtctacaatgtggaaagtggtcccttagatatggaatccttatgcagtatagaacctgaacaccagcccatagaggccctggatataagaacgttacagataaaaaccactaggagtttttgtttgtttgtttgtttttgagatggagtctcactctgttgctcaggctggagtgtaatggcgccatctcagctcacggcaacctctgcctcctgggttcatgccattctcctgcctcagcctcccaagtagctgggactacaggcacccgccaccacgcctggctaatttttgtatttttagtggagacggggtttcaccgtgttagccaggatggtctcgatctcctgacctcgtgatccacccgcctcagcctcccaaagtgttgggattacaggtgtgagccaccgcgcctggccaccactaggagtttttaaaaagagagatattacttgttgccagggaaatcctggaagactttgtgaaaggtgtcattgaagctaggtggtggtaggtttaaactacagactaaagggcacaggaagatggatggaagagacttaggtaggggcaaagatgcagggcttgtgaagaaacagtgagtagtctagcttagctgccttatatggttgtcttataaagtctgctgaaaaccagggtggaatattagaggatagagggacttgaccagaaatgaacacctgctaatctgctgtactaacagatgagtcaataactggaatggggaatcctggaaatgcagacaagagtcagattgtgaaggatcttgaataccatgaagactttatcctaaacaatgcggggggtggtggggtagtgggggtcgcctagcaaagtacaggaggaaaagaagcaggatgagtaacatgatcacatctgagttttaaaaaatcacttggattgcagctgccaggtgatttggtgagaagagtgagtaggagtgaccagttaggagttaactgcaatagtccaggcagcagatgagctcccaacctttagggagaggcaaagcagaggaatgaggcaagattcatttttgacaaaagccttgttacatcacgtgacataaggagaaatcaaagatgattcttttgtgttttagcttgattaaataggaatgccaataattaaaaggcaggaatgaggagggatccacttgagcaggtggctggcaactgaactccagatgtgccaagtttgaagtcctgtggcaatatcccgtaaggagtttaactcgttgatctggaaggagttcaatacagagatccggaccagagaggaggtgggagcggtagctgtgagaatggctaagagaagggggctgaaagtaatattctgttcaaccttgccattacaggctgtgacggaagaagatctgaggacagtgaaagaactattattcccagaaaagctctctcagaatccaagggaagagcttcaggaagctcttcaggaaggaagcaattatcattggtgtaaatagtgtcaaataccacagaggtgtcaagtaagataacttaatcactggattgagaggtctgggagtaagctgaagggaaagcagtcagagggtagcagcagcaggtgaggagggagcgcactttcagacatgtgaatagccttcctttaccttcacctcgatggtgaacggtggaacacaggcgttttctgctctgcccactatcacttcctctaaggggtcccattcgttgtaagaagagacagggcagtccttgggcagaggctcagtggctttgtcgtcagctgcacaggagttccgggaggaagccgtagctgcctgggtgctctggaaagttcgctgcacccatcctgtcaaggttcgtccaagcttccaagaacaaagaaaagattattgtattgcattgctctatcagtacttacagagaggaggaagtggagatggagtaaaaatccagcataacattgccacttaaacccctttagaacagcataaaccaagacgttaacagtgtgtaggtgggtagtgggattacagataatttttttaaccctcttgtttatctacaaattgtcttcttatctattaattgctgtaactctttaaaactcctcagaagaccgtgtccccagctaccatacacccccatctttatctcagaatgcaattcctgcactcaagctttaagcaactgttttgcagatgggtcagtcctcctctcagaaaaccatagacagctgctctaaaacttcccgccagtctcagctggggacggaacctccttttcccttaagtatcaaaggttaccaatattaggctttttatttatttttttttacaaatgaaaagttgggaacatttgtaaaggaccttatctttcagaataaccagcttcaaatcaaatttttttcatctttgacatacacttcgcattctttggcacttcaattctgagagtgagcaactgccatctgctccattttacagatggtccacagtaccctagccaaggtcaggattagctcaggcgtaaattcaaacaaataagaaggagatctaaaaacttcaaaagccttttaaaaatgcatggcctataaaatctagagcagggagggtccctcaacccctgagcaaacctcaaccccccaaatctctatcctgctctgttaaaagccttaggaagtgggcaggaggagaactcgggtggaggcagaagaaagacggagaatgacagctgttcaggaaccagttgctgggaggaagccagaatgtcggagcgattccagtactagaagcatgggagggtctgctgccagggcagccgagggcggggagcgcagaaactctgcttacaggctgcactcgccccgactcctctccagacgtgggatcccatgttatacttggagtgaatctggtcgctcgctccccgtccccgattcccactttgcttgcctcttctccccatccatctaccccacacgcattttccagaaatctccccaactcgacgcccactcaggctactgaaccccaataacgccacccttttactaagaggagcctccgtcgtcccaaccccttgctccgagcgggaagcttggtgcagcgcaccaaggtccggtagaggggggcggcgccccctgcgccgtgggccagcaggccgcggacgcgcagacagcaagtagaccccaagggctggagccgcaacgcaagttccccctgactgggggacgccgcccagctcctggagcctgcgaaggctcttgaagctgagcttcccagggataccagaagggacactctcgtgcaattccggctagggaaagcgagggaaggtggcggctccgggcagggagcgagcgagtgctccacgccgcccgcaggatcgagtgagtcacgcggccgccagacgaggccggtggcgcacgcacccgagatccgatgtagtgcaccgcctcggcgccgcggctcccgccgcgcagacaccgcacccgcagcatcgccctggcccggctggtccacgcgcggactgttcctggcctctgggccgcgtcggtccaagccttcccgagagcgcgcccggagcggggtgggcgggcgcgcggggcccgaggccttttgtagccgcgctccgccccggccgccccccgcggccccattggctgccgggaacaggtggtggggccggcgtagcgccccgaattaggaactgtcgggaagcgccgcggccgctggctcgagcctccgatgcttgcccttttttagccagcggggccactgacggcttctgttgcacgtccggacccggacccagacccgagcgtcgcaagaaggcccgttggagtctcgcgcaactgggcaggacgcgacttctgacgaagtgacaatggtctatgcatatattaagtgaatatttgagaatttaaatatgcaaagcgtgagtacagtgttacccttaaattcacatatgcgcactgaaccagtcacctcatttttcggtaaacgaaaccacctaaagattaggtggtttcttggtgcaacatcgggtttgagactgcagaaaactaagtctggaaattgggccatttgttccccggggaggcagtgctttccttccagtaccccgtcggttgttatttggaacacctggcatttcacatggtctttggccatrtgcccctggcttgagaaactccgtcatgaaaatcgacaagtgtgggtcagaaataagggaggacgacagtttcgttccttccatttcatgttttaaaatttttgtttcaacttgatcaggattcttttttagaaaagtattttccctcacagtgcagtcttaattgctgtggatttgtacagagctagagaactcaggttaacatttatgctcctagcaggagggggggcaagagatttgagtatttcatttttgtacttatagaattataactattcatttttgatgagctgtcttttcaattttggtatctcaagcttgttttccagagttcatggatggaaagcaccagacgagcagatggcatggtggaaagagcctccgagagggaattaggataactgagttccagtcctgaatcacttatagactactatatgtcttcctgaattgcagtcttcttatctgcaaagtgagaacaatagaatttactgtccctagcacatggggggttgctgagaggccaaaatgagagattgtacatgcagaacttgatgcgtggcattagagctgtatgaggccgggtgcagtggctcacgcctgtaatcccagcaattgggaaggccgaggcaggcggattgcctgaggtcaggagtttgagactatcctggtcaacatgatgaaaccctgtctactaaaaatacaaaaactaggtcgggcgcggtggctcatgcttgtaatcccagcactttgggaggccgaggcgggcggatcacgaggtcaggagatcaagaccatcctggctaacatggtgaaaccccgtctctactaaaaatacaaaaaaaaattagccgggcgtggtggcgggcgcctgtagtctcagctactcgggaggctgaggcaggagaatggcgtgaacccgggaggcggagcttgtagtgaggcgagatggcgccactgcactccagcctgggcgacagagctagactccgtctcaaaaaaaaaaaaaaaaaaaaaaaaaaaaagccgggcatggtggtgggtgcctgtaatcccagctactgagctgagatcgagccactacactccagcctgggcgacagagcaagactccatctggggaaaaaaaaaaaaaaaaagctatatgaggtaatgtgttactactctagcaataaggaggcccccaaatgccataatatggtgaaaggagtaagtctaggttcataacttaattctgccacttaatttgctgtgtgacctggaaccaaatccctttatctttctaatcaaggcttcatacttctagtgaggttttgggaaatctctaacatttctcaaaatttaaaaagtacttactcccaacaataaaatgcagccacctctgaggtctgattctcttagtgtactgagggcagccagagatgtgcttctcctgaaaagaactgaagagtacagtaagtacacataacaagcccttgagattactataccatttctgcttgagattggaggacatcctcttgccacccattaaaagcactattttaattttgcagatgtaagaattgggagtgtctggtaataatgaagtttacgatgttgttaagttttacataatgaaaaactcatagccaaagagcatacccttatctcctgggatccagcagaaagtgtgtggatagcgccacccaaaccagtcctactgttataaaagcaaatcaaagcactcactcctcctttttgctatgcctctgatttactttcattctttgtcctttttccccttttataccacacttttattcattcactacaattatattttttcattctcttctatgttctgtttttgaaaaaatttggtaacaatttctagagtgacctcatcaatttaaagtacaagctttccatattagattgtttgtctaatactgggccaactctgcaaagtatctatatagtgatagttggcaactccgtggtctttagttgctgccttattcagaagaaatggaatagactgtgaagtcttgtcttgccttcccctattggcagtagataccattaaatactttgattgaaccaataattttaggatcttggtggtctcatacctagtcgttatgcatattcaagtctaatagtagttcatctttgtagcttaacttaaaggcataatttaggatagtgtgtgtataaaggggtctaaaaggacagggaatagaaaacataccagaagcatggcaaaaattcagcttttcaattcttcctcatcactgttgctttcgagatatgcccaactctccctagttccaaccaacaaagcacagagtttttgaaatgtgtcttgaaattaaaaaagcaagtaaagtcattggattaacaaaataaacaacaaaagagcccgttgtaagaatttattatttctatatcatggttgacttcagaatctgtacatagggcataaacaagtacagaggaaggtgttcctagaacttaagaatacagatactctgtgaaattggttaagcacacacatatacacacagatacactggatgagattagctatctacagaagtcacctattctaagagacatttgtacctacagtttaggggaaggatatctctcaaagtaaattagaaacaataatgtattactcaagttcaaacaaggtgactaaagtatattctcatgcctggaatgtaaataaagctgcaatttttttagaaaatattatttgggctgcatcaataaaatatatttggaaggatacacagatactgataacctaagttgtccctggggaggggacctggatgactaggaaacaggaatgagagagattttccactgtaagccttattgtacctttgaacacgtgagtgaattacctaataaacaaaaaacatatttaaaagactgcatttgcagggtgtgattatcaacatggagtttttaaaaaggaagcctgagtggccaacctatcggagtctgttcatccagatctacctaaggatggaatcagaatattctggcctctggaaaggttaaatctattgaggacaagaataattctgtgggtttttatgaaatatccctcaaaactattcacctcctctaacttgtgagctcaccaagctcatccctgggaaccttggcataggggagttaccctgcaggctgagcacaagtgatctgatagctggaaagatgaagatctcattgtaaagtattaaatcagtattctgctgggtgtggtggttcacacctgtaatctcagcactctgggaggctgaggtgggtggatcacctgaggtcagaagtttgagaccagcctggcaaacatggcaaaaccccatctctactaaaaatacaaaaattagccaggtgtgttggtgcacacctgtaatcccagctactcgggaggttgaggcaggagaattgcttgaacccatctgagaccagcctggcaaatatggcaaaaccccgtctctactaaaaatacaaaaattagccaggcgtgttggtgcacacctgtaatcccagctactctggaggctgaggcaggagaattgcttgaacccaggaggtggaggttgccctgagccgagatcataccactgcactccagcctgggcaacaggagagaaactctgtctcaaaaatattagtaataataataataataaacattctagcttatccctcagagtgtggtgagttctagctcagttcttgcttcctaattatgtttcccttcttaatgttctctttttcctgactacctagtcaattccaggtaaactgatggaatttactttctaaatctgaaatgctgtgggactggcctgatcccacaatagcctgtgttccctggaattgcctgcttatatggctgttggctccttaaggacagggagtctgttttacccaccagtatatccctagcacagtgcctgacacagccagagtccttaatcaattgttcaatgccactctgatggcccaggctagaataaccagagctccctctttggtactttgcagtctttgatttcaaatgagttacaaaatcttgtgaaggcagcctctgcactgtcccttacgaatcattttaggatttttactagttttgaacagctgtgttattactgctcaacatctcccaatgaggtagattctttcattggaagacaactgcaaaacactagctccagctaaattaaatgccagctttctccaagtatttaaaataatctcagcttaggttagcactgaaactgatacagctttaagaaaactgaggaagaaacatttgaagtctgctccaagggatcttcttattttttttactttagtcttcaaatacccttctggaatttaaaaacagtaaacaccattctctttcttaaggttctgactaaacttaaaggcaaaggctaacccatttgccaaattgctgctttttttttttttaatttaatgtagtctcactctgttgcccaggctggagtgcagtggcatgatctcagctcactgcaacctccgcctcccgggttaaagcgatttctggctaatttttgtatttttagtagagatggggtttcaccatattggccaggctggtctcgaactcctgacctcacaatctgcccgcctcagcctcccaaagtgctgggattacaggcatgagccaccatgcccggccagcttcaattaattttaaaatcatttctactctaataataataactactatttactgagcacttactatgtgccagataagagcttcacatgttatttcatttagtcatctatgaggtattcttataatatttttgtttcaaagatgaagaaaccgagccctacaggattaaacaaattgtcctaagtgaaacagtggccaagtggctaatagagccaaaattcaaatccaggcctctaagactcaaaagcctgagcccttaacttctaggacacttgattttctcacagattctcaggagaatagctactgcatgatgcagggtgcatacatgtagtccaactactttcagtgttcaccactcctgtaagctgcatattgtgtcgcatgctgccatcttgatatttcaagatatctctgagtgttttttctgggagttatttataactgtccttcttaggataatgctatacccataaagactgcatggtaatgagtctttgacaaactgaacttatgtgggtcagctagagctgaatgctaaagagatagaaagtccagaactagtataaggcctctaaacaagctcaggtatagcttagatctctgttgggaactctacagaggcaagagaaggtattttagcataggggtagctgttgctccctgcactgtagtcaaagaagggacagcaggaaggggaaattgccttagaagggtctgtcccattgggatggttctggaaatacaatgtatgttcatcctgacttaattacaaccctcggacttttagtggtagctaaaatagctccactcacgccactgagaaagctgtgccttacatttcccctaaattgacacttccccacccctcctttgttttttgagacagagtctccctctgtcatcctggttggagtgcagtggtgcgatcatagctcactgcagccttgacctcccaggctcaagcaatcctcccacctcaaactcccaagtaccagggactacagatatgcatcactgcctggctaatgtttacatttttttgtagagatgaggtcatactatgttgcctaggctggtctcaaactcctgggttcccatgatcctcctgcctcagcctcccaaagaaatgagattacaggtgtgagccaacctttccctttcttaacccaacagcctctagcactggttgtgctagtcagacagtgcgtatctagacagtgcccaaaagtgaggaagtcatattggctaattccagaaatgatgcagaagttagtgaatctctatcattatgttacatgatattggtgccacgaagatgccactgtccataaacaatccctggtgttgcaggaaatatttttggggcaccttagtggtaagaaggcagctgtcactggaccttctccctcatctcattcttgtagcctaaattcctttcccagtactttttcaaacatcttctccaagctgattctctatttacactttttgtctaaagcctcaaaaaaatgctataagaaacagattgaatgaccaacaacaattaaagaatggttaaggaaattattacacattcagcatttggcaaaatgcttgggtcttagatgaataaatacatttttcttaatatttcttaagtgaatgaataaatttaggatttataataaataaatttcatcataagatgaacatgcaccactaaataatgtttaaagagagtttttcttttaat

SEQ ID NO: 97067 - DNA, 12438 bp, Homo sapiens
ctgggcacagaacattcgctaagggactcaagtcccagctgagagggtagttgagcacagccaagccagcccctgcccagctcttggctgagctgccctgtcaggcttttcagcataaacacaaggaccttctgaccaaggttcctcctgggagaacaagttctgaccctcaatcctgctaaatttgagtctccccacccaccacatctgggctgcttggctcccatgtttgctctggcactccctccagaggtggccctgtagtctccccccagtcccggggccctctgcatctctgtggctctgtgagggtagggtagcacccctccttctgtttgtgctacacagggattcagggtgagttccctgtgctccttcaccccaggagtctggcctgggggagcatgaggctgtcctgagtaaggacagaaggtgcaggagcagcaggatccccggtctctgggtggagcagggagctctgcacacggatgccaggcaccaccctctgtccagcccatctgtcgtgctccccgcctggccctggcagagggagtgacagggtagagctgggatagggagtcagggcccattctgtagacagggccaggaatggagggtgggggtccagggacagcactgcagagcaccagctgggccttgggggtcctggggacttccctgatggtggcttagtcatggggaggtgtctgttcttttgtcagcagcttcaattaagaccagaatgaggccgggcgcagtggctcatgcctgtaatcccaacactttgggaggccaaggcaggtggatcacctgaggtcaggagtttgacactagcctggccaacatggtgaaaccctgtctctactaaaaatacaaaaattagtcgggcatggtggcatgcgcctgtagtcccagctactcaagaggctgaggcaggagaatcgcttgaaccggggaggtgagggttgcagtgagccaagatcacaccactgcactccagcctgggtgatagagcgagactctatctccaaaaaacaaaaacaaacaaaacaaccaggatgggctggtcacggtggctcgtacctgtaatcccagcactttgggaggccgaggcaggcagacagatcacctgaggtcaggagtttgagaccagcctggccaacatggtgaaaccctgtttctactaaaaatacaaaacaaattagctggacctggtggcatatgcctgtaatcccagctgctggggagactgaggcaggagggttgcctgaacctgggaggcagaggttgcagtgagccaagattgtgccatcgcactccagcctgggtgacagggtgagactccgtctcaaaaaaagaaaaaaaaatacccacaaaaaaacaaacagaaaaacccaagatgaagtcttgggtcactctgaggggacttgggatcagggatcccttagtaggttttcctggctcagggccttcatatcttggcctgtttcaggtcgggaagatgacccagagctggtgggtgcctggggccacagagttccccccactccataaccagttatgcacaggcccttcccactgcccctgctgattgaggggctgccgcctctggcagagcaacggggagctgagcatggccaccagagggcagctgggaccgccacagcaggcaagaccggctccacccagcttcctgcggcagaccaggacccttccccagacacctggcttggatgaccggagctcggcctccaagctgcctattgagggcgtggagttggaaaggagccaagcaaggcccctcggtaccccccacatgcttggtgcaggcagaaggaagcctgaaggccagctggtgggtgaccacacacaggctcagcagggacagtgaaggactagccctgtgcctgcgtagccccaaaagtgcagtgtccttcaagtgtgtgcccaggggcctcccaagccttcccaggtgtggtctgtgcctcaatgtccacagcagaagtgggcgtgttctcactatgtgcccagggtggcagcaggcctaggagaacactcggttttgctgtagtggacagcattgtcattgagcagcatggaccttccctgtccactggccacggggcactccattcacctgcctgcattggctgttgccagggcatgttctcagctacctacagtcagtgtcacctcgcgctcatagagcaggaagcgaggagacttggggagggggtggcctgctgaggccacactgcagggagtgcagagcgagctcacctgggcccctcattgcctacccagcccaggctgcatcctccatcccagttctgggcccagtgtgtacccatgggagctgccctgtgccgtcagctatccaaaggactgtagcttgccaatctggctgtgtggcctgggccaggcttatgccccagtgtgagacctctcagccctctggttggaccatggataccgtgccagaaccacagggcttactagggcatcagtggggtgtagccaggggctgacagagccccatggccagccatcgggtctggacagtttggtggggagacccagtgtgggggtcccatggcatgggtaggcccaggccatcctcactgggaaaagggcccaataaagggcgtggtcattcccccgctttgaggcggctggtactgggtccttggccaggcaggtgaccccagagcttgcagagcactcaggggggctccccaaggtgagcacctccccaccttcccatatgatcctatcactagttctgccttcacatcactgtcctgtctgtcgtccctctgtccgtccactgcccagagctcccttaggttgtccacagatgctctgctctgcccctgcctgtacgatgctgatgtgcctagtgcacccttaggaaggatacccacagctctggctgctcctaccactcagcctcctgtggtgctgctatcctctgctcccacccatctcctgggggaagccctctccaatgcctcacttggaccccttcccagggtctgctattggctctaccatatggttgcaggttcttggcctggctggaccccatgaggtaggaggcccatgaggaaggacccatgttctcctttggtcacacttccccaactgggtggggggggggggactttgggaggcctggaggcaggaagacctgagttaaatcctggcccagcccttgtctggctgggacccagtttctccatgtgtaaaatggggtatatagccaacctgaggcacctggtagagtcagtgagatgacggctcacagccagtgtgtctcggttctgtggcacatggtgactccgggggagaggctggtgcttatcagggataaaaaaaaaaagtcacatggttctctgtggtacaaaacctatgtgaacacttaagctaaaaccagaggtttcctagaaatgtcacactcagagcaaaagctggttcctaagcctcagaccttggagtaggagcagcatctcctcttcctcggggcgcagtgctggtggatgggctcccaaccgggcctgcccatctcaggtgcacacacacactcatattcacatgcacacacatgcatatgcacatgtgcctggcttggtccccagttcttccctgcctcaggccctgcatcccaccccccatgatcccaccctgaggcgtagccagtcgcccaccctcacttggaccccttcccatgatgaagaggctgtcgtgagacggggaaacacaccgttggggcaccagaatggaccatgaccacaaaggactattgggcggggcctcagaacaatctagaaaacaccgtagaggcgggggagagagctctcattaccgatgtcccccagagacagcctcccatccgaggcccagcccttccctgtctgtctgcagtgtcctgtttttcatttttatgacatgaacactctggcaatatccccgggcctagatataaggagagggaatgtgtccccggggccattagctgagacaggaagccgcagggtcctcccctgaggaaggctgaaagctgtgtgagtacaggcacccccttgtctcctgctccagcccataagcctgagctccccaggcttgagtgccaggtcccccatcccagacaaatggttattcacacctggccacagctccagggccaggaacctgcctgcttccccgccctccctgtactggagactgttgggggcagctgcctgcctgggagggcccaggatctatgttggcctcagggaacctcaggagaggcacgtggcctcgcccacaaggcgggagcggactctagggaggtggagcagatgtcttatggggctgtgagcacctgcgtggggcaacaggaccctgagcctggctaccctggggtgggaatactgctgtgctgtgtgtgatggggaagacgtcattatcagtccacatctctgaaggatcacgtttctgaaggatggtcaacagcattagacatgctgacaaggaaccgtggcagcccagtgtcacctacagtcctggacatgtgggggcaagaaggtacacatgagtgtgtggttatgagtcaggagcaccacgggatgaccttcagatcaggcatgacaaggtcctgcttagaggacggtctgggcttgtgtacctttatccggcagggacctacccagctggattgacctcactcatgccctctggtttccctgcaggagccagagcctgcagggtgggtgtcgggacatgctgatcttccctcaagacaggtgagtggcctgggtttagcttggggacatcctctcccacataggacagcagagtgttctggtgggcctggcgggtgggggtgacagggatggactggccctggacactgtgtgctcctggtccttctcaccctgggtaggcacagcccctgggctggacagggtggatgtgagggcctcctgccaccagcttgggtttgttactggcctgaatatgggcagcagccactggtttgatgtctggctttagggacaagcctgtttggggctggctgacgaggttgctggtcagtgttggtttggacattcactgggtctgctcttcacctgcctgagctaggatgccagccgcagtggcatccagtattggcacagcctgctgggccaggccattcgcttgccccccagagactggagccacagggacagaggatagtcctggaggccaggcacacaaaactttgtttgaaaaggtctgatagtaagtaattcaattttgcaggccttatggtctctgtcacagctgcagttctctgccattgtaggatgaaaatggctgcagacagcccataactgaatagtctgaatgtactctgatcacagccgtaggccatgtgtactggcccgtggcctcaggtgttatctgtgtttggggttcctctgcttatcatggctgctagctccagtgggactgaggcatagcgcctgggaagcatggcagggttggaggctgagtggtccatgtcccccaggaccctctgaaggatggtaaggcataccctgctcacatccacgctgccagagttttgccacgatgggtgctgttcagcagagtgggtgatggcttaagagaatggctcctggccattcttgttcctccagtccccaccctggccatctgcctgtccccccaaaaagcagtctctgtgggaggcatggctgacagccctgtggtttctcagtgacaattagtgcccattgtggaggcatggcccagccagtgctgtgcctaagtggtagggagaaggccatggcctccggatgcctgagtgacctaggctgagggatctagggcagatgggagggacaggatgactgactccttgcctgttcccaagtccttgggcatggaaagctgccggccgggccagcctagtgggagctgggtctgctgccgcctggctgtgtgggaggaccagcgtctggccgagaatgtcactgctcaggccatttggccatgcagggtcttctgggttgggacaaagaagctcaggcagggtacttggcttgcttgtggcacaggtgacagggcatctcagggtggcaggaggggctgtcccactgcccttaactcctcgtaggtcaccacacttcagggaggccaggtcagccagacaccaaacgacarccctggtaacagggtccgcaggagggtggttggctgggcaggtccgaggctgcccaggcacacttgctcactctccctcctgttgcttgctcctttcttgtcccttcttttccctcccccctccagttcttggtcttctctatgtttctctgtggccctctctgtgcctctttctctgcctttccccatctcctatcctgcccatctggaatgtggtgattgcttattcctgtctgctgtggtgattggtttttcatgtctgccctgggcactggtgcgatgggtgatggcatttgtgccatctctgctctggcctgggcaacctgggccctggcttgcggctgcctgctctgctgggccctggggtgtggtcctgtccacagcgggaggcagctggggagggagcctcagggctcagctgggacaggggctgatgtaaacacccatgtgtcaccacactcagcacccactcacccagcctcatgctgggtcctgggcatcacaggcacatcaggcccagccctgcccctgaggagctcccagcctggttgaggagatccacaacacacagaggaaccagtggccaactgtggggttacaagatggtgatgagtagcatggctcccttaggagggggagctgggagggtgtgatggggtggtgcgtgctgagaccaggcctgagtgagaagggctggcggggacacagatgccctgccgtttcccatagctggccagcagtggtgtcctctcagagaccagcaccagcctggcctcctccatcagccgccgtgtgcctgcagggggttgcggcttcgtctcctgcggccgcctggcccctatgacaggccttctcttgggttttgatgtgtttctcagccattgtatgagtctttgtatattaaagatattaattcttcactcctctttctgcctactgcacatttttctcacccttttagtttttgtttatgatcattttgatgtcaaaaatgtttcatattttgtggtgaagtgtgttggatttttccccatttttagatattccgtctctctgtgtagtcaactctccctagcatgcagccagataaagatgcacctgtcttttcttctagaaggtatttttactttagttttgtacacagcatttaatctgtctgtcttagtccattttgggctgctgtatcagaatacctgagactggctaattcctgaaaaacaaagacttatttctaacaattttggagatggggaagtccaggattgaggggccacatctggcgagggccttctttgtcgctacatcccccaggaggtggcagaagggcaggagcacacgtgagagagcgctgaaggaggcggaacccatccttttatcagtaacctgctcccgagataacaaatccactcccactgtaacggaattaatccattcatgtagcagagcccttgtgacctaaacacctcttagaggtcctaccttcaacactgttgcgttgggaattaagtttccaacacgtgaactttgggggacacgttcagcccatagcacaaactagtatttattctgatgtaaatggacggcaaggatttaactttgtttttacagctgcatctgaactgtttcctttttgtttgtttgttttgagacggagtctcgctctgtcacccagactggggtgcagtggcgcattcttggctcactgcaaccttcacctcccacgttcaagcaattctcctgcctcaacctcccgagtagctgggattacaggtgcctgccaccatcaccagctaatttttaaatttttttttttaatagagatgggatttcaccatgtccaggctggtgtcgaactcctgacctcaggtgatcctcccgcctcggcctcccaaagtgctgggattacaggtgtgagccaccgctcccggccatgcctggctaatttttgtattttttgtacagacagggttgtgccatgttgcccaggttggtctcgaacttctgggccccagcaatccacttgccttggcctcccaaagtgctgggattacaggtgtgagccactgcacccagccttaaatttttacctttgatatactatttatttcaaaagggtaggccaggcgcggtggctcatgcttgtaatcccagcactttgggaggctgaggcaggcagatcacgaggtcaagagatcaagaccatcctggtcaacatggtgaaaccccgtctctactaaaaatacaaaaattagctaggcatggtggcacgcgcctgtagtcccagctactcgggaggctgaggcaggagaatcacttgaacccaggaggcggaagttgcagtgagccgagatcgcgccactgcactctagcctggcgacagggcaagactccgtctcaaaaaataaataaataaaagggtattatgcaatttcttacttattatgtgagggagcctcttttttttttttgagacagagtcacgctctaccgcccaggctggagtgcagtggcgcgatctcggctcactgcaagctccgcctcctgggttcacaccattctcctgcctcagcctcccaagtagctggaactacaggcgctcaccgccacacccggctaattttttttgtacttttagtagagacggggtttcaccatgttagccaggatggtctcgatctcctgacctcgtgatccgcccgccttggcctcccaaagtgctgagattacaggcgtgagccaccacgcctggccagggagcctcttttttaattttaatttttaattatggtagaatacacataacaaaatttactatcttaaccattttcaagtgtacaattcagtagtgttgtttgttcacattgctgtgcaaccaatttcagaacttttttttattcttgcaaaatagaaactctgtacccattagaaaactccccgtttgcccctttcttgaagtgcttctacttttcctattgtttgactactttagatgccttacataaatagaatctcacagtatctgtctttttgtgactggcttatttcacttagtatcatgagaatatcatatgtcagaatttgatgcctgatattccattgtatatctataccacattttgtttatccatttttccactggtggacacttgggttgcttcccctttttggctattgtgaataatgctgctgtgaatatgattgtgcacatatctcttggagactctgctttcaattctttttttttttttttttagacggagtctcgctctgccgcccaggctggagtgcagtggcacgatcttggctcactgcaagctccgcctcccaagttcacaagtagctgggactacaggcgcctgtcaccacgcccggctaatttttttgtgtttttagtagagacggggtttcaccgtgctagccaggatggtctcgatctcctgaccttgtgatccacccgcctcggcctcccaaagtgttgggattacaggcgtgagccaccacgcctggcctcaattcttttagatacataatgcagaattttctgattgctggaccatatggtaattctatttttaattttttgaggaattgccatactgatcttacattcccaccagcagtgcacaagggtcttaatttgtctgtatctctgccaaaactttttttttttttttagactagccatcctaataggtgtaaggtgatatttcattgcagccttgatttgctcttccctaatgatagaaatgttgagcaaattttttaacgtgcttgttggccgtttatatatcttctttggagaaatgtcagttcaactccactcatttttaaattgggttatttgtgtttttttgctgttgttaagttttgggagttctttacatattctggatatgaattccttttcagatatatgatttacaaatcttttctcccattctgttggttgctttttcactatattgattgtgtcctttgatgaacatacattttaaatttggatgtagtacaatttatttttccttctgttgcctgtgtttttggtatcttatctaagatatcattgccaaatccagtgtcatgaagactttcccctatattttcttctaagagttttatagtttgaggtcttatgtttagatctttcatctattttgagttaatttttgtgtatgtaataaggtaagggtgtgagttcattcatttacgtgtgtgtatccagttccatcatttgttgaaaataccatcatttccctaatgaatggtcttggcacctttattgaaggtcatttgaccgtattcatgagggtttgtttctgggctctgtattctattccattggtctttgtgtctgtccttatgctaataccacactgttttgattactgtagctttgtagtaagttttgaaatcaggaagtgtgagtccttaaatgttgttctttttccagattgttttggctctttgggctccttaaagatcgatataaatcttatgatagatttctctgtttctgcaaacaatgtcattgggattttttttttcttttcttttttttttttgacaggtcttgttctgtcatctaggctggaatgcaatggtgtgatcctagcttactgcggccttgaacccctgggttcaagcagttctttagcctcagcctctgactagctaggattacagatacatgctactatgcctggctgtcattgggattttaataggaattgcactgaatctgtagatccctttcagtagtatcgtcattgtgacagtggtaaatcttcccagccatgaacatgggatatctttccactgatttaggtctttttaaatttttcttggtaatgttttatagttttcagtgtacagatcttaagtttcttaagtttagtattatgtattctattctttttaatggtattgtaaatggaatagtttttttaaatttccctttcaggttgttcattgttcatatatagaaatgcaactgatttctgggtattcattttttatcctgcacctttgctgatttcattttttacatctaatagagtttttaaaaaatgcatgtagaatctttacggttttatataaggttatgtcgtctatgaacagagatggtttttctttctttctaatttggatgtcttttatttctttttcttgcctaattactctgtctaaaacttctagtactatgttgaatggaagtggtcaaaacagccatctttgtcttgtttatgatcttaggagaaaagctttcagtctttcaccattgagtatgatgttatgggcttttcacatatagctttcatcatgttgagaaagtttccttcttttcctagtttgagtgtttttatcatgacagactattgaattttgttaaatgtttttcctgcatcatttgacatgattgtgatttttgtcctttattctattactgtggcgtattacattgattgatttttgtacatggaaccatccttgcattccaggagtaaaatcccacttggttaggtttataattcttgtaaaatgcagctgaatttggtttgctagtgtttttttgtttgtttgtttgttttgagaatttttgtttcagtattcataagggttattggcctgtggttttcttttcttgtagtgtcttttcctggctttggtattagggtaaggctgacctcataaaatgaattaggaagtgttccttcctctttatttttgggaaaagtttgaggacgattggtgttaaaattacttgaatgtttggtagaatacaccagtgaaaccatctttgctggaggtttttgattactgattcagttttgttgctagttgtaaatctaatcaatgttttctatttcttcatgattcagtcttggtaggttgtgtgtttctaggaaatttttccatttcatctgggttatctaatttgttggtgtataattctttatggtagtctgttaccatctttttattttaatgttatacaaagaaaaggaaaacaaattgaggtttttttttgttctgttttattgtttgattgttgtttggcttggttagattttgttttgtggttcttggatttgtacctaatctgttggagtcatcagtccacaaacccatgaatttcctgagccagtaaaaatgcttccaatgggcagctgacagaggactgctacagacaactggagctgccttaatgcattcagaatcgcaggcccttgctgaaaaaatcaa

SEQ ID NO: 97068 - DNA, 12456 bp, Homo sapiens
tggaggggcggggtcggtggcttggggagccgcggaggtgggggaggggccaccactgaccccgcccccggccccacagccaatcggtacgcgaagcgaaggcggcgtcacacgtgctgcagacagtgtggagctacaaggagctgcgtggtaccttgcagaaagatggttggaccaaggcgcgcttccaggtgcggcttccctggccttccttccattccctgctcactttgccttattcccactccatgtgcttcacccaccctgtgtctgtgttttatgtctcagtcagctgctgctactgccaaggggcctaagggagcactgagtcctgggggcttcgatgacagcacgctgccactggtggacaagagccttggtgagtggtggagcttagggagcctagagggtggcgaccccagctgccccagttgcctgacccttgggtgagggtgaaggaggagtcaggcctcccactgagacggcttccataggccactttccctgccctctgcctcttggctactcccttcccacagcatccgcgctgttgtcaagctggggtgaggctgccagctggcagaggttgggcaccttagtgacagagagcctctagggctacctgggccagccctgtgtgggcttctctgccccgatcccccctggctgccacatgcagcccgcctcctcctcctgccttgcagagggcgagaaaactggcagccgggatgtgatccccatggatgcgctgggcccaggtgagtgcagatgcagtgtggttggttttctgtgccgggaggggaccaaggcctgaagtgggcctgctggttttatggggtgtagatggtgctgggtggaggagagatatttggtttaggggtgcttagagggtgaggtacagggcagctagagagggattagtgctcagccaggggctctgacccacaagtggaggggagtctggagagttggcagggtgttggtgagagctggcaccagcctggatctccaggacagggtgggtgggggctgtctcccaaagcccctgtcccacgagtcccctgtgtctgggctgagagggagatctgctcctacagggcctccctcagagcgcccctcatgccccaccttaccccatctacagacggatactccacggtggaccagagggagcggaggccacggggcgccagctctgcaggagaggcctctgagaaggaacccttgaaagtaagtggtcatgtggctgtgggcaggtccccggtgaggccctgtgtctaggggttgctggagagcagcctaggccatgctgggtctggtctgggccctggggtacagctgggttgtggggccaagcccaggaagcagccccttcacgccagtcagtctgtgggtactgacaagtttgcagctcccacccactggggacaacactgcccggccacaccctgcatgggccagagcctgtgagctagtgtgtgtgcacccttctgtgcatgtgcgtgtgagagcccaccagggtccaccagcgatggcaggacctgctgcctgctgtgtgccaatcccctggcttcctgtgcaggcctgtgtgtgtgcacgtgcccgccctgggcccgtgtgagccacatgtttccggctccctgcgcccttggtgctacctgtgctgtcctggcaggccaacccttacatcgccagcctcggccctgcccctgccctgtccccccaggagctctaactaacctgctctattgtgcctctaatgcccacccgtgcgctgcagctcgaccccagcaggaaggcccctccccccgggcccagcaggcccgcggtcaggctggtggacgccgtaggggacgctaagcctcagcccgttgattcctgggtctagcttgcatgcctggtacgttctctcatctggttgttcgtccacctgttcctgccctctgggccagggcttcttgttagtctctgctgcctgcacgctctgctcttcccgcacgttccccgcaggactttggcctccagtccagcagcccagtggcccattcccggaaagaccaggcagaggtcagagagggagggtgctccctgggcccacagccctgtcccaggcactgtgggatcaggggcctgaggaaatgggaccagagtagggatgggcaccataccctccaacgcccttcggggaccagcaagtcaggatcagccctggtgccaagacccttggggtcagcccacaccacccagggcagatgcttctatccacatctccatccatgtagcctgtggagttggctgccctgccctgaggttacacgtggtcctgtgccactcagtggctgcagcgtccaccatcccctttccctctgcagggcccaggcccagcctcttgttcttagggcttggatcgtggaagaagggccaccctgagcagatcgtgccgtggagcttggagccccctggcggcaggggttggcagcgcctcgccccagccaagcctgactttggggacaccctcctgcccccccaccccactccccccatcctacctaactccctaggcctgagttagctgtttactgacatggtgctgtgtgtgagcgagtgacagaaggcccgaggaggccgactgggctgctggggcagggcccagggaggtggcagggaagggtgcctggctgggctttggggctggtgggataggagggtgcccctgggaacacagtgccccagtggtgcgggccaggtctggcgccaggggcaggcagctaggcagggagggggctgggaaagaacttggacttctaaaggcggagggtctccctgggcaccctgcaggcaggcagaccacagtgtggggggtgccccacaaggctcagccctgggcaaggaagctttggaagcagcaaggtgggggtcaggctacaggtgccccacctccccagagccctgcagtcacgtgaggcccctgtgcagtagagagcctttctccagcccatgctggctgtggccggggctgccgcatctgcctggagcctgggcagcacctccgggactgaccttcggcagtggctgggggactgctttcagtgcctgctgttcgtgactcagaaacagaagaaaaacactgagaaaaagcattaaaaataagccaaaataagactattggtaaacacctaaatttttgtaagaaaatttaaaaattaaagcagcaaaggaactttttgctttctgccactcaggtctggcacaagtggctggcttctcccttgtgtcgggcctctgcgcgtctggggcagggccctgggtggaggtggtcccaggtgcccatctgctgtgtcctgcagaggctctgtttctggtccctgggtggccccaaacttgtccacttgggctcactggtctgtctatccataggagtgggctggctgggggctagccaggccttgagcccaggagtagaatcttggctaggggctggtctcggtgcaggtgaactcagctagcacagggttgattcctgtcctgggcctgggaactgggcccttggagcctctgaggtggctagcagtctgaccccttggaggagatggggacagctctaggtgtaggtggacagaaaccagcactgcatcctcactcatgggccagggaggcaactacagggatgcgggagctggtctgagccattgcctcttctgtaagcaaggcccagtggggagtagggaaggagatgcttccactctgtgccacatggggcccagaggggctggtgctgctgcggggtccacctgtccccagcgcctgcttggtcagaaaggtgtgaatgctggctgactcctcttcgtttcccaggctggcagtcgtccccatggggctaacaggtgcccctggcctagctgcaggagggctgacctctgcaccactgtggctgggaggccagtgggccaggcgtgccacccagaacccagccagctaggggccccgcccttagcgttagcgtccgtcaaggggagctttgaatgtttggtgcccaagtcaagggcagcaggggaatggcagttgagaaggatgtactaagtcgagttatatctaaatatttagattcttaatttctattttatatttttaaaacatgatattagtatataagataatatagctagccagtgttagtaaagaagtcatgattgagtcttaaaaaagaacaatccagtgttgcagttcagagaggttagcatgtcagggcgcaggcctcggccgaggtgtgctttgcatttaggacacagcccggagccgcagaaggtcagcaggagcacgtctggcaccttcagtaccaggctgggtgagagagcccgagaggggggccggggggggcagtcagggccctgcttcgctgcctgggcccttgtagatggccttctccaggccgtccaccacctccctgtattccaggaacgattggtagtgtgtgcactcaaagcagctgctcccgcgcacgtgtgctaggaagtctggcgcacctgggcagatcacgttgtcagccagtagcactgtccccttccgcagcaggccacattcctgcaaacagaccggggggtgggggaggtgagggtcagaggtgcccagagaacctgccccaaaccaggatgggtgctcctcactaggccacggcaccacgcctgtgcctagcccctggggccaggtttccactttctgcccagcgtgactcctgcaggaaaggactgtacaagacttgggtgccaccttcagaacatgggccccgtgaggacagggacctttctctcatcaactcctgtatccatctcaggagtatccatcccttagaacagcatgtggcacacagtaggtgctcaataaatgctagctgggtgagtggaaacaatggggccctcaacacccagtgccaggaactcaggcctatgagggagaggcacccaaggagaggggttgctggtatggtccctggagacaatattggcctgaccagggtgaccctgcagggctgaggtggggcagacctcccatcaacaagcctgccccttggggtcagttctggacatccccaagctcctgcatttgcagaccccccatcttcaccagtgcctgggccctgggaggacacagagttcctctgcctgggttctgtgcagaaggaaggagttgttactggacacgcagccatagggcatggcccgtggggtccactatcgggagaaacctcataggatgcttgcctatctatgctatcagaaaagggtttgcttacatcacataaacaagaaaccttgagaggaagtgtttgcctatggggaggaaggacctaccagggcaagggacaccccagtcaccttgtcttggaaatttgacttagtcaccaaacaaaagttaacaagcaatctcaaacatctaaagtataataaaatcaatttgcaggcaggtgccttgaaacactggtatccgaccccacatgcctctgggatgggcctggagagtcccacagggcttgcagctgtcctggtggtgggtggcggtcgtttccagcctgtatgctgcagagaaagcagggggctttcatgtgacagtatggacaccacacggctgcaaggtcagtgaggtcaggggacagccccaaggtccggagttgagcaggaagtaccaccatgaatcatgatgtgttttcatttagaaaaaaaaaaaaatgtcctagcaatgtcagctgaaaagacgtagaacaaagcgccacccgggaggaggacaatggcctaggccttgagcagggcggctgccttccagtctgggccagggaatgcatgagtgaggggcctgggctcctggacttctcgggttgcgccaggggactcaggagcccaatctggtcatcagggatacagaagacgtcagcggactgaaagacaccagaccactgcacctgcacgagttaaacaggaaagaaggagggaagggcagaaaggagcatgggtcacctttggaggctgccaggggcccactcctttacgaaactggtcaagaggggaaagaaggcagcacctgtcctgcctgtcgcccgacactgcaagcctcctaccagctactcagaccacctggagaactggctaaacatgcatcagcgtctgagcaggactgaaaatctaatgccrtggagaagcgacagtgtcagaggagcaggtgacactatgctgaggtggttttcatctggcccaccctccttagactctcctcccttcaagagttggagcctcacagaggttgcagggagccaagatcgcgccactgcactccagcctgggcracagagcgagagactgtctcgagaaacaacaacaaaaagttggagcctcagaccaagcacacacctgtactcccagcactttgggaggttgaggcaagaggatcgcttgaggccaggagtttgagaccagtctgggcaacatagggagaccccatttctacaaaaaatttttaaattagccaggtgtagtggtgcatgcctttagtcctagctactcaggaggctgaggtgggaggatcactggagctcaggagtttgaggctacagtgagctatgatgtcatcactgcactccagcctgggcacagagcaagactctgtctttttctttttttttttttttttaagggggaactcattcctcttcctttgggcatgggctggacttggtgactacagcagcccggtggagaggcctcctcaaagcagcccttgattttgaattgcaacctgctcctgagcccctcaccccccgtgcctccgatgctcacagaacccactgaggggatggctagaccctcacaagagccaggttgtcccctaaccctccacaagggggcacagggccccagccctgagtgtgcagatgtgcgtttaacaaggacacccattcccaattcatgacttcccacttcatgactttgcttcttttgagataattaccagctttgcgcaagcagcactgagaaaactattagtttcctagttactaaactgcaatgtttgctacttttctatgaaggcaggcccctgtaattagcacccacatcacagctgctgaaactcggccgcagtaacgcaggcccagctgtgggtgtctttcctgcccaagtgaagcccatctggctgagtgccagctctctgccatcaatacccaattgccagcatcatgctcctttgtcaggggtgagcccccctccagctaccctgtcttggcctgtaggtctccctcccaccctcccaatgcccacccccttggccactacaggtcctccctctccacggccagggttcagtgcctcctcgtgagttcagggcatctgaaatgccctccccacagccctctccacactccacaaggctgacagggatctttccagaaaagtttttgttgttttttgttgttttaaaagctggaatacggccggacgcagtggctcacgcctgtaatcccagcactttgggaggccgaggcgggcggatcacgaagtcaggatattgagaccatcctggccaatgtggtgaaaccccatctctactaaactacaaaaaactagccgggtgtggcagcgcgcgcctgtagtcccagctactcaggaggctaaggcagggtaatcgcttgaacccaagaggtggaggttgcagtgagccgtgatcgtgccactgcactccagcctggtgacagagcaagactccatctaaaatatatatatatattttttcttttgccatgttgcccaggctggtctcgaactctcctggcctcaagcgctcctcctgccgtagcctcccaaagtgcaagggttacaggcatgagcccctgagcccagctccagaagacaggtctaacctcatcctcacctgcccaaagtcctgtgtgccctgactcccattgttcctggaacattctctgccctttcacacctcaggcttctgctagtgctggttccttccaatccgtgtccagggtccagcggccctacctagccaggcatgggggctgtgcccctcgtgctcctagtccggctgctaacagcagtgtccagtttctgggagagctgcaggtgagcgagcaccaggtggggaggccgtgagggtgggtgtcccaagcccagtggaggatcacagagccactcagtgtcgctgaccaccagggagggatggggcagtgtgtcactgatgtgaggctccttaagcatcagtctgtgaagggccaccagtgccccacgccccccagggaagcgaggacagccccacccgctgtctagcctcactcggggcactcagggtcctcgccagtggggctgggttgggggaatgcacaagatggggcctcaggaggaagatctgcaggagacacatgctttctttgcacgagcagtggcttgcttgggggagagcaggctgggcccagagcggcccttccccaccccatctccttggtcctgtgccgtttctgccctggtgtctggtctggggtgtgcaccccacttctgccacccattttgcacctgcacaggcagctggctccccagttcccaacaggccacccagccaggcccctggcccagctccccacccatctccacccaccacagggcctcctcagtcccccacactcccagacctcaggtggtgcctccagagcgagctgtgtccacacagggctctactggaatgcctggctctttggagaggctgaggctgactgaatgggctctgggcagcagctggcacggatgccatcctggttggggctcacctccaagagaagcgtgtccggcaggtaccggtccttccagtggtcgaggaagaccatgtccagtgtgtccacatcatacttcttcttcagctgggggatgatgtcctgggacgctccaaccacaagggtgacctggaacagcgcctgtcagtgcccacgtcctcacagacaggaggccatccctacacacctatacaacagcgcctgtcagtgcccacgcccacacagacaggaggccatctttacacacccatacaagcattcatcagttttctttagggttctgggatgacaaggccccactctgtccctgcccctcctggtgccaccttggcagtttacccagagctgtgagaccctcactgagctgctgggggggtctttcctcagccccaggctgggaagcactgaggggcctggtgatagtgggttttcagtgaacgtggtgtgaacacctggtggggaggacaaagtgcgcatgccctccctgcccacagccggccctttttccaggtctgacaacgggtcaggcatgcacaccttgtccttcatgccagcgaaatccaccatccgctgggtgatggcggcacagtcggggttgatctcgatggtgatgagcctcgcccctggtgacagcaggcgggccatgcgcacagctgagtagccacagtaggcccccagctccagcagcacggagggctggtgctcctgaatcacggcgtccacgatcttgcctgtgcagggttggggacggaggagaggtgagcacaggtggagagaggggaacttggatccccaggcacggccccccacctctcccaaagagcaggagcccctcccaaatgcctggccgctggccctcctctgcccaccctccctacccgctggaggggtatttcacctccctggtgtccccagcccccaggacctggtccccactgtgagcgcgcttggagctcccatggtcccttagcctctatgctcacgctggtccctatcttttccacccttcctggctggccccagtgtgtcctaacacagagctgccctctctgaatcaccgaaccgcccaccttggggccctggggcggcactagttccctgagtcactccgtgagcccggtaacacatcctgtgccccaggctgaagttcaagcgggaggcgggcccaggagaacctgtctgactggtccccaggcaggtcccatggtggccagaacagagttcaaggggaactgcaccaccgtcagaccctgtgagtgtgggggcctgttgtcctggggcagcaggcagcagggcctgcaggggtcatcagggaccctggcaccctgggactccagaggagccccccagccctatctgggcatatcccagggttcccagccccctggaaatggggtgataacagcttctcctgtaagggctttgatgcctggtcctgggtccctgtcccagagctgagcacctgctggcccggaccccacctttcttgtcgcccacgttcatggcccactccttctgctcgcagtaggtgtcaatggcctccagcacgctctgtgcgttcccgggctccgcatgctgcagcacatggttcaggatgcgctgctccttggtgtcacccatgagcaggttgtggatgggctgcaggatgaactcgttccagccgataaggcacaggccccagccccagtgcctcagaagcagcagcagcaccaccagcagcaccaggcccagcaacacagctgccaacagcagaggcggggcctccggcatctgcagggcgggaggggaggggcgccagtgctctgtgctcctcctgcagcacccacacgcccctttgcttggagtgccaccatcgcccccttgtgtttgcagaggggcaaggttcagaaatgccagccttgtgcctcagttgcctgacgtgtcagcgccagggagccagccttctcgtgccctctggtgccctcgggtagacagagcaggtgtgtgcctctggcagtcctgtgtggagcctgcagggtcacactccctggccctgggtgcttccccaggcagcccagggatcctctaaaaccacacaaaatacagaagcagacacggactcaggctgttgtctcccagctggcttagaggacacccaggggtagggaagccccatggcccggagttgggggtagtcacgggtggccaaaggagaggctgtatggtgcagccccttggcctcatgtggtgagcccgtgctggtcacccatgctctggacgccccagggattcatgtggccttttcattgagtgtccaagtaaggacactggcagtccccaggccaggcacaccaggacagacccactcaccactccccttgggaacagcaacgtggcatgtcccagatgagaaaggccagccctgccgcccacaacagtgtacctcgtggggcacagtgatggcaagtgaccccacttgaaacctgtttgaaatcctcctggtgtgaccctccaggcaggtagcctgggaaccagacagaagcctggtgaggggacccagcaggcagagagcagagcacaggaggcctgaggcagaagcccaggggttcaggtcacagaccctaaaacgggaaggacacaaggaaacttcttctagggcccctgtgctcactcagaggtctttctgggatggggccctgggctcccagtggcataggagatcccactctctgctggacgctccattttagaaaggcacacccaggcaaggaggcaggcctagggccacagaggggacacccctggaggccagcctcagggcaccagaggacagagcagaagagaacagggaagcagaggctccgccctagggggaggtcatgcggacaccaggcttctaggggatttcaggccatgtggcctatttacacaggcagagtggacatgtgctcagcagacctgtgcccatgcaccgggccggaatctgtacccaccctggcactgccccggcttccgttggccaactcaccttcaaagcacctctgagcaggctccagccctctggctgcgggaggggtctggggtctcctctgagctcggcagcaaagcagatgttatttctgtggaaatcaattttgcctttggataatcatcaacataaaccctaacctggcgatgaccaaggtccagatacctgagccccttccccggatagggccagcctggcctgagccttccctagcagggcgagggcagtgcttcgcctttccggcctcagaagagacagcagaaggcctcagagaggccaagggacatccctactagtgtcccccagccagggaccccaggggcagtctcctggtccctgtccacactgccctgtgggctatgtgtgtgtgcacctgcaccttgtgaaccacaagaggagggaaccactctgctcaagttgtatttcccctgaagagtccttagtaccttggaaatgatgtgtaagaccaagggctagtttaccaagaacatacacaaaccagtaagaaaaagatgatgagacagataggtcacagtggccaacatgcagctcacaggaaaaggccaaaggccagagccccgagcaggtgatggaacccggtgcagggctcagtgacagtgggggtgcccct

SEQ ID NO: 97069 - DNA, 43238 bp, Homo sapiens
  misc_feature (1)...(43238): n = A,T,C or G
ttgtattcccaagaaggtacgggctgcaaaaaatacagttaaaatggttatccatttcctgtaggaataccattgaggttgaaaaaagaaaaaaaagcacatgtcatctgtataattcatcacccacccagtgacagaccctgtcaaaaggaatgtgtgttccctaagcacattcccaaatcagcaagttcccttacagatcatcaagtgacatctgaatgcttctgcgcagtagggccacttaaagtttcacagcaacctcttcatgtgctcattttgaggaccttgaaacaaaaaaatgtacaaggtcctttgcattacacattcatcagaagttcaaaattctggccacactgcttgtcttgccaagaccttacaaccgcagctgcaagaaaacatacctgtcccccaaaagttgtttttatgcactgtgtctcgtctaggcaagcgcttccaagaagccaggattcacttgagaatgtgtctctctctggcaggtctcgacatgacgactactgtgtaggtgagggaggaactttcaaagcactttcttttcccacttactatgtgtgagaagttgctcctgctctagatctcatgtgccagtactcaccaatttgtaaaaggcttagtaccttttaaagctgctctctccatttcaaacttgaacaaaaatttcattgaacattgaagtttggaactacttcttcgacatttcagcaaactcactgaaactcaaagacccacagatcacagtgaacagtttgaaacaaggctgtaccatggcagtcatgcaaagcatgggacagaagaaataccacggcagtgaactgtgaggataacttccattttttccctcggagagaacagtttacggggcagaggtgatatgttctgccttttgaagattactggcacacgttcagctttttcacctctctaatcgactggaagcagccagccgatcactagtcctccatccccctcgagtcctccgattgtcatgcctaggccttgccacaaagacagcacctttatgtgaaaaaaaacttagaaaaaatgcaggttaaagaaagcaataaactttctttaaaaaagttaaatggagatcttctgggaaaccaagccatgaatgcgagtttgtactaacctagccctctggaggccacatctgtagcaatcagaataggagcttttccatgtttgaattctacaaaggaaggcatatacatgatcaattatctgagcagaattctagctaggttaagtaagggggaaaaatacttcatttgaaatatttaccatttagaacccagtcacgctcttgttgactcttgtcaccatggatacccatggcaggccacctaagttaaaagacaagttgtgttattaaactcacattgaaaacctcagactccagtgcttgaccacttttggtcacagatctctttaatttcgccagaaatgaaaaagttaaattcactatcagatatgaaaaaaatccactgctcgtgatccaagtttgccctttcctaagctgttttaatcaatctgcttcaatggaggagctcacacatacccatctctcctcatttttctggtaagctcatcacatcttcttttggtttccacaaaaacaatggttttattctccttctcactcatgatctcttccattagacgaataagtctaataataggagagagaaaggaaaaatcctgagttttaaaagaccattgctagggccacacatttatggtcagcaaaacattaagttcaatttacatggctggaagtcaaagaggaaacgcctgctaatccacttatcgagcagttcgacccttggtccttaagtcaaccaggggacacatgaattccttctataggaaagctataaatggtgacagccattatttgaaggattcaagaaattttcaggattagtaggctaactaaatgaaatcacaccaactgaaataacctaaaacaactcaccaaacaatgatccctcaattttacagcaaagttgttaggaagcaaatataacagagttaataaaacttacttttcatccttttctacgtcatgacacacatccacaatctgaagaatgttgtggtttgcactcagttcaagtgcaccaatgtttatatgaatatagtctttcaggaaatcttcagcaagctgtcttacttcttttggccaagtcgcactccacattagagtttgcctatcaggctaatggattttggggggaaaaattagtatcagactcttaagagtgaaaacacaattcagtttgatcacatatttcaaaggacacttactcttatttgatccacaatcttccttatttggggttcaaagcccatatcaagcattctatctgcttcatcaaggacaaggtaggttgttcttctcagattggtttttccacactctaaaaagtcaatcagtcttccaggtgttgcaatacagatttccacacctttaattaaatacgtaagtgtaactacaatacctaggatatttagcaccaatgacaaataaaacccttttcattacatacctctctccaaatcacgtatttgtggtcccttaggagcaccaccgtagatacaagtagacttcaagcgacatgctctacaatattcagcagctacttgctgcacctgttgggccagttcccgagttggtgccagcaccaaacactaaggaaagagaaacagctttcagcacaaacctggatactagttttaaactgctaacttattatactagcagatcctttcttcatgtgttgtccaatacccaaaacagctccagctgaataggatgagctaacctctatataaaaccaccacaaatgattacatctttagctatgtagtctaaaatctacacattatgcttctaataaaagtaaaaatatatacttacaataggcccatcgcctctctctaggaatggctgatgattgatgtggacaatggcaggaagcaaatactatttagggtgaaagtggggacaaacagaaatcacattaaaatactcgtttttaaattaccattacattttcttgcatatatcagatcaactcaagagttctcccaaacttacagacaatgttttcccagatccagtctgtgccactccaaccatatccaatccacttagagcaactggccatccctgagcttgaatagcagtgggttcagtgaaattctgtcttgcaataacatccatgacatttgctataattagtaacagatatttagtaaaaattagtgatgccaagaaaaagagggggtaggtggaaacaaaaacacgggtaggtagaactgaaaagtagcacttaccagggaaattggcttcataaaaatttagaactggcttcgggcagttgtgacctctaactgtaatttccttgcttcttctgtatgtttccacctcttgctgcaaaacaaattataacagtcttaaaattcatgacaccacccctagctaaatacgtaattgataagcccctaacttcataatttagtaactagtttaaagtagccttcattttaatctggacccacctatgaacaccctattatgaaaaaaaaaatttattgttatactcaacctaatttaagtaaaaatcccaaagccacctatatccaaaagtgagtcacacctttcccaattatgaagtcagaacatgtaactctaccaaaattgagttatttgcaaaacacctgtcagaatttcatttactagaatccacgatcgagttacagcctgatgaagccacatgaatttactcactgctgtgcgcctagccaaatcagggtgctcttgataaaaattcttctcaaatttaggcagctcatcaagattccacttctttttaactaatttctccccagggtttccaaacttctttccagataagggccctgccctacttcctccaaatcgaggtgcaccaaacctggaatgaaaaaaaacgttattcacattttcaaatggctatacccaggtttctgtatagatttgtcatccattggcacaagctaaaaaccactgaaaacagacttcgagaggtaaacctagcactgtccttcgtgaaaatctctctctctctcaacagccacagttaacatttcccgtagtcccaagtacacattacttaggtcatgtaaacagcctgggatttatcatgtcggaagccggggatttatcatgtcggaaacttgtcacccacatgccagaatttgggattctggcacacaccacttcttgtggttactgtaatcttccccaccagcctagcaattcactatcagcaataacaaggctacatgaaccgaagagcatcacgacgatgttactcatatggccgttttggaaccaaacagctttagtggtaagaacctaaacagtacagtcagcgataacagaacaagggttttctcagaaacacttctgctagcaaacccagctgggggaacgccgcggtagagctccggatcaacgaatcaaaattatataacgcaggaaaaaagaaaaggaggagccggcgactaccgggggaggagtcccggcccgggcggagtcggccgggcggcgttcccgctggggcggcgcttccccctttgtctcgcatttctctctgcgccacattttctcgacgctgccattttgagctcctccgccgggcggggtaacaaaggcgccgccgccatgtccgaggccggcattttgtactcgcgactcagccacatggctgatgccggccgccctcctaccccaacagcaccagggctttggaagtggtcccctcgctcccacagaatgcccggccaccccaaaaacacctcccgaaacgccgcacctaacagatgttccttcgtctgcctcgaagcgtcccgctttcatccgcacaatacgctccctctcaactccctcaacagctaccaaatggcagccgccccgacagctccccaatccccacacaaaaagcaagcttgaagacactacaccgtcaaatctcttccaatcactgtgacgtgaatatcaaaatggcgcaagccttcgggaaaggaagtcccaagatagcccggaaaggccaagtccaagccgcaaagcccccgccggccgccaccctgacccgccctcccatccccccacccgccaggcctgacagctcggctcccaaactcaccctcggtcccggccgcggtctcggtcactcgaataacccgacatggcgtcaatggttgcggttggcggggaacgaagtatatagaaaagcgtgcgacaagtcgctggaaatggcctcgatgacggcgaagccttgcgggggcggcagcggaggaaggacaccgatgacaccagccgaagctgcactactagagaccggtagaaatgaatgaggtgccggccgctttccggcagccgcttttgtagtctggaccgcctcctacgccgcagggaacgctgggagccgctctatgacctaatcgccccgcccctcgcgcataggccgcaacgcccgctggcgttccaggatcgccgcgctttcacccctccccgcgccactctctcaggtcagggcccacccaccattggaatgcctcattctgcactctcttgacctcaccttcttctggtctttccacacctcaagcaagccaccccgccctttcccaagcccagccccgcccaccctcgccactcggagatgtttacgtctccaaagagccctcacgtctgtaaccaaaagagggggaaggcggggcctggcgttgtcacgtggctgtaccaccccggaccaccgagagagcggtccgcactactttcccgttgacgtcggcggagggatacaaaacgaaatagctcaccggaagtgcgctgctcgcaccccgggacccgcccgggctgccggctgatgtggaccgtccgacccgcgtgtctgataatcctttgacgggttttggtcggcggagaatggtctctaaacttcccaaaccgcccccgtttcacgtcctgtgaaaggaagtgctcctctgatgaccaatcagcggcgagaagctcttttaacgtccgtccttctttcacgcctccttccccgcgctttggttcgtgcgtccgcgccccagygtcgggtctgcgtggatcggtccttccaggacaccgtcgccttcccggccgcgtcggagtccggcggcgacctgcctctgaaacatggcaggctcggatgctggtgagtgtctccctggggtcccagtatgtgtggactgaaaccgtccacctccagggaggcctcgggctagcccggactgggtctgggctgtcggcggggctcgtgaccttcagacgccgcgtcgcgctggcgggttccctggatagggtctctcagcttcaccacctcttcgcttcgaggccgtggaacagcagtatgctgtgggagagagagaggcactggggcgaggccggtaggacacttgggtcytggctgtaaaaagagcggtcagaagggtcgtccccggacttgtctttctgtggggcgtctagccgctgtccgtgtgccctccgcccttgcactatgggccctgaggtcgtacctgcttttgtattggtctttaaaggaacagcattcttaagatttattatgcccctgcagaatagtagaatatgcccctgtagaatagttgtgcttttttctcttcagtgccctctagagtcatgggctttgtctagcaccgcttttgaagagcgaattaatttggttgtctaggacgctttcatccttttcacaaggactgcgtacaaaccagttgtcatggtttggccagctgtgagaaatgggcgtggggagggggattatgtgcatggaaaatacactctcattcgtttccagaacgttacgtgtccagaacatagtggagatgtttgtttctaataccgattgaaagtgctttcctaccaattcccaggcatttcaaggaacaagtattttaagctaagttacttttggyacagaaaccgttaaactttgcaaatcccagcaatatctaggggagaggagaatgtggtacgcaggaaacgtcaacagtattgataattctgagcttcatgtacttcccatattttctttcatatagatcgatataataaaaaagaaaaactaacaaatgcattaccgttgatgttgttattataccagttcttaacagcctaagtttaatcaccactttttccrgcaccagagaaaccctgacttgcacaagataattgggtaaacacaagaccaatactattgcaagtgcgaagcagcctccattaatgagtttctggtaacctsggattatcattaaactgttgtttatgacataatattcctgtttacttgtaaatatgttttaactaaaaacacccatgtaaggcttatataagtaacttaagattttaggctgcaacagtatcaattgaatttgsagtatagttttgactatgtagaaattacagcactctggaaatcatcccaagaaattaaatacatctttttaaaaaccatgcctaaagggtctttgaaattctctaacaatcaaattccttatcttctgcaaagttcagtgtctgtttttgttgggggggaggttgttggattttttaaatgtctgtgtgatttttttctggtggtttttaagactgatctttccccctttttcccaacagagtgggtaaccattgccaataaccttctttttaagtgtcatatacatctgagaatacatgaacttcaagactgtgatgctaatgtttttattgctctttatcagtctattttgggagaaaaggtaccaggtaagaatactaaaagcaggagtaattttgcctatatcttaggccaaaagtttttagtcctttagttagattctttgatatttataaaatttcattttctctttgcttgtttctttttttaatattgcatattaaattctatattaatatacaatattaaaataaatattgtatattaaattgtatttaatatcacatattgtataattataatattgtattccttaaggaataccctgtggaacccactcataataacggccttgagcagatcagtttgagggctcctgataatcacggcttaacctaatcatggctactgccttgtgaaagttgcatcttttctgtaaatgtaccttcaaaggttgtaaaattgagtggagcttgggaatttattggattctgttacttaaccagtgctagggataagaattgatgcttgtagatgatgaacctcatttaccaagacagttaataagcgcatatgtcctttcatcttgctcaccatctcactatgttcaagaccagggtggtaccaactcagcttaagtgatcctcccgtctacctcccaaagtgataggattacaggcatgagccaccacgtccagcctgtgctgaccttttaaatctttataccaataattctagttggctattcaaaaggacatataagggccaggcgcggtggctcacacctctaatcccattaccttgggaggctcatcacttgaggcaggtggatcacctgaggccaggagttcaataccagcctggccaatatggcaaaatgccatctctgctaaaaatacaaaaattagccaggcatagtggtgcacgcctataaacccagctacttgggaggctgaggcaagagaattgcttgagccgggaaagtggaggttgtagtgagccaagatcacgccactgcattccagcctgggcgatagagcgagaccctgtctcaataaataataaataaacatacatatgtgtatatataagaacgctccttgaatgcctgctgtgttttttttttcttcgtagaaagtagcccatagttatgggttaaagtatcatgtcttggctcccttattagactattagctgtctttgaatttagggaccactttatcttccttaacatggtgcttcttgtaaagcatattcatgtatatctatatatctatatatatatatatggtgtaataaatattcaaccgtattcaaccagtctaatattgataaatcggttcaatcaataaatactcaaccagtaaagattctgctgtgtagagttcagggtttattaactttatctgtactttacagcatgttctgtttgggcagagcctttatagcagttgagcatattcagtagcctagtcagagacaatgagatgaaaacttggcctctcatggatacaaaattatgtgatttttyccccccccagacctcatagttattcctaggagtcaagaagatgatgcacacaatgtacaagcagtaattgattcactggccttggactacttgcaggtcagcttgtctcacataacaggttggtatatgtataactatcacayaattatgcattttagtaaaaataattgttagaactgtagacattgtttacttaaccaaatgagtgagcttatggagtagaccaaattgtaagattgagctaagacaatcaactgatagaggtcaggtccatacatgagaacttttccaggagagctgaacattgattttgcaattgatctgggtctgaaacgtaaatatcctagctggtaatttgaggtgtgttttttgtttttatgttatgttgttttatttatttttattttttgattcagagtctctgttgcccaggctggagtgcagtggtgcaatcacagctcactgcagcctcaacctcccaagctcaggtgatcctctcacctcagcctcccgggtagccggggctacaggtgtgcaccaccatgcctggctaattttttctattttttgtaaagacaagagtttcgccatttgcccaggctggtctggaactcctgggctcagctgatccacctggctccactcgtgaaattgctgggattacaggcctggaccactgtgcctggccttcggggaacctgccccgatagtcacgtaggttcttttctattttatctaagcatcggcaggtttgagaaataaagggacagagtacaaaagagagaaattttaaagctgggcgtctgggggagacatcacatgtctgtaggttccgtgatgccccacaagctgcaaaaaccagcaagtttttattagggattttcaaaaggggagggagtatacgaataggttgtgggtcacagacatcaagtacttcacaaggtaatagaatatcacaaggcaaatggaggcagggcgagatcacaggaccacctgactggggtgaaattaaaattgctaatgaagttttgggcaccattgtcattgataacatcttatcaggagacagggttttgagagcaacctgtctgaccaaaatttattaggcgggaatttcttcttcctaataagcctgggagcgatatgggagactgaggtctatttcagccctacagtctacagaccataaaagatggccacgccygggggaccgtctgtagacctgcccccaggcgtgtattctctttcccagggatgttccttgctgagaaaaagaattcagcgatatttctcccatttgcttttgaaagaaaagaaatatggctctgttccgcccggctcaccaacggacagagtttaaggttatctgtcttattccctgaacaattgctgttatcctgttctttttttcaaggtgcccagatttcatattgttcaaacacacatgctctacaattttgtgcagttaacgcaattatcacgtggtcctgaggctacatacatcctcctcggtttacaagatgacaggattaagagattaaagtgaagacaggcctaggaaatcacaagggtattgattggggaagtgataagtgtccatgaaatctttacaattcatgttcagagattgcagtaaagacaggcataagaagttataaaagtattaatttggggaactaataaatgtccatgaaatcttcacaatccacgttcttctgccatggcttcagccggtccctctgtttggggtccctgacttctcgcaacacctggccgtattgttttattttaaagcatactaatgctacttgtttgtgatagctaaaaattagaaacacctaaatgtccattagtagggattggttagataaatcatgatagctgcatacagtggactgctctgtggctgtaaaagatgactgaatatgctctttgtgcacaatgttccgtgttgggaacaatctctagcatatgtgatgcgagaaaaatgtagtacaattataatggtaatgtgcagagtagtatgctagtgtttgtaaaaacaaaggtgtgcagaagtatttgcagttgtttgcaatcggaagaactctctagaagcatatacaagaaactcgtaatactgattgcttccaacaaagggaacctcagggttgcaggacaaagggacaagaactttcagtgtatactttttgcacttgctgaattttgaaccatgttatctattcagaagtttttttctgtaattaaatctccaaaataaagtatactatactgtattctaaaactaagcataccaaatatatttataaatcactgtattatgtgtatttcatttatgtttagaaatgaatgattattccagtaagttatttcaagcttatgaatagagggaatattgacaatgtgaaactataatcacaaaaagaggatttatactgttgatttattctttgatagttgtaaaaggagataaatgttaatcaggataagtcctgatttacatctcttaatttgatactgacaagaacaaatttttgcgaagagaataaaatactcttctgtcttaagttttttaatgcagttctaggtgagtgaatgggtaaatcagttcggagataatttgagggctactcccatagtttccctcttttttttgcaatttgtaattgctttatcacccaagtaggacaagttctggtatttgtgcttgttaaacatactatagcagggttataaacatacatgtttgtaaaactctttaatgcagagctgtctttgacagattacacccaccctatgaaaaattgtaaaacagtttctcctgcagcatgaagcactgcattctggctggcagtcttagttgctaggttgtcagtatactccccatcctagaaactgaaaagttttgaggatgctcttgggatatacttaggtatttttaagccggaaaaacacgtccaaaaccaagatttctggttcattgttttaaacgaaaaaactcaaacgttgtcgttactagtagtagtataaaacgtcaaatttctggtttaggtttgttttgcatcatggctgaggttacgaatggctagattctcccaaatgtcaaatttctacactgcttttcccatattggtgtgaactcatgagaatgccaggcatgatctcccaaaggacaatcagagtgtcacaagggttaagtactatctatacctgaggttgatttggagtccatttcaggtgacattaaatatgtcaagtttccatgctttttgccaacccatttctattcaacatttcaacctaatcatttatattaaaaatctgttacggagtaggtactgtgctagggactgtgctatgatctatgagtgtaagttatgaatatgaagtggatatggtaagagatgtagctggagacgctgaagatggagtgagatttaaaaaggttttatatgcagggcttatatttcagaaagggagccagggaaaggattttaatcagaaaaatggtatgatctatacaaaatgaggagttaacaaatatggggggttatggtggagaattcaggaatttctgatgaaagtatcccaacaagtttattgtttttttttgttgttttgatgttactctgctgctataatcttctgaacaaaccaccatttagaataggataccacaatctgaaagtgttctctcctgccactttttcccaccaatctggtaaagttctgtttagctgcaatatattttggtataaatcttactagacatgttttcttaagtccaattattttgcttctccaaaaaaggaaggaatatgccagtgaattattagacgccatatttaaagcttccccctttttttcttcaaatataatcaggcagcaggaaattgttgttyttaatatttataattgtttcacctgtattcttttttttatttaatctccaaggagctgtaagttggtatgtatcgcctgtattcttaaatagcattttcrcaatgttatatccaagtttcaagattatgaagctttcagatttcatggttaaattttttaatagctctatattctgtctccaggagaaaatatagtgaaaggagataaagaatctattaagaatctcctggaaatatttgatggtttgttggagtatcttacagaacgcatcagtgaaacatctcatgagaaaagtaagtttaagaatggaaatttggtttggtttaccttttatgatgtgtccyttttgccttttatctttttgtgtatttttcttcataggaagcagattcactaatacagtatacctgataaccgtagttgtaaatttcaaattcttattgttccagctggttggaaactgtcttagactgtcatcatgttctttatcaacttggatgttgctcataaattacttcaaaactaatttatactagaaagataaatttctggctaaattatttattgtcctatgattgcataaaatttctttctccaaaatttcgtgtgtcagaactgctatttatggtaaatatttggatgttactgaggcatcaacaggaagaattggtgcatttgtgtctttagcctgcacttacatttgtgacagcctaaatatttcagatatttgtcattgcaaaaagtgaaagaacttaactgtcttaataatttgagattaagtaaataatgctgttggtcacgaatggaataatatattacctgttcttatgttgaaaagttatcaaaaataaactttcagcagcaaccacaatttacataaattcgaatacaaattaagacaaaaaattggggtaggctcatcctccattctcactttgtttatagtgagacctgtgatagtcacatttgaaattaatcttaaagtctttagttagagatagtttcctacctttaatcattgttactaaactgtttaaaaactgggagggaaaattgaaaagtctgccacactggacatttctttgtttcaaaaattgagtgttttataggcgtctgggtactctgggaggattccaagctgcttgtcatgttgatactctcaaacctgtacttgagtcagggagacagccataactacatacaataaaagcataaagggggaattagaactaggggagagtattgacaggtgggactcacctaattcaaggctaccagtaggtatttgtatgctgtgtacctttctagtctttttagtaacagggttaagaggtagaaaacaacctctaagtaaagagattgagattaatttgaaatgtaaagagagcagcagttttttacagtttagtgcttgctcgcaggaaggggagggatggtagtgcctggctaatgatatggcagtggggatgaagagaggaggaggcaactgagagatacttttatgtgagtctggtggtggtgaaagactgaaggatattcccaggggagatcggcagtatgtggtgagctactggggaagttgctcagataggcttccctatatgacagtaccttagctggacagcattttcttacagtctgcttctcatctttgcaggtctaatatatacttacctggcaatatttcctagagctgatcaggttcttcaaaatgccagttaacagtaatgggaaacaaatctttattatcactaatcatatcagctgtgcagggcagcttcaacctgggacctgagctagcattatcatttaccactgaagaaggaggggttcgaaggaagaccatgggttcagtgctgggttcttcctctcactatatgatggcagctctctaagcctgttttctcatctgaaattctttcatggttgttgtgaaagttaagtaagtagatgtgtgtaaacagttgggcacacagcctagctcagagtaaatgcataataaatgttaattgatgttattgaaatgttgcttggtgaatatggaagtagaaaaaaatgaaggtgggtgtttgaatggtgaatctctagacatgggcatgagaatatccaaaggggtaaatctgaatcatgggaggtttcacctacatgtattttgaaattatttccctagtgagttatagctactggtgaaagtatgtattcttcaagtatggtggggtggaaaaagactgatggtcttaagaaaaatttcatccaagccctgatacagcctgactcagcctaaggcatgattatcttggagcttgcattatgttgacacaatcacgttttctgtcaccttgatatacctcagacatcctttacagatggagaggtataaaaatattgaatggacctgccactgacttaaaaaataaaacattgctcatacaactgtagaccctgtttttaaagcaatattcttgtttctttgttactcgaataatacatgctcattacaggtgatttggttctttctgattgcactttcactagaaccctgtttaccatggcaagttaggggtgcctcactgtccttacctttccctgcctcttacatagaaaaagtagtattcacttaggggttttttggtattgtttttatctgttctgaacaggtgaaactgaacagtattttaaagaatctgatcgaggagaacgtttggaagagccagaaagtactaaagaatctaaatcatcatggaaaagagtttcttttgggaggtagcacttagtgtctctgaatttgatgaaaacaagttacgctttttggactaagaattaaaatcacacgtaatataccaagatggcaccaaaaaaagctaatgtgaaacttctactaacttctcatattttaaactttcctgagggagttttaagaaccttgagttacatataatacctaaatctcagtatcaactatctactcatttttatatttttctttttttttcttttttgagacggagtctcattctgttgcccaggctggagtgtggtggcatgatctcgactcactgcaaactctgcttcccaggttcaagggattctcctgcctcagcctcctgagtagctgggattacaggcacgcgccaccatgcccggctaatttttatatttttagtagagatggggtttcaccatgttggtcaggctggcctcgaactcctgatctcaggtgatccacctgccttggcctcccaaagtgctgggattacaggcatgagccaccgcgcctggtccctgtttttctcttaatcatcaaagtacgtcatcatctttgcaaaaaacttgcaaaatagaaaaagcaggaaaaaaaatctattccgaactaaataactgctgttaacattttgttaaattttttagtcctttttactatttttttcttttttggatttagtcatatgtctatataatttcgttgcctgcccctcacccctgcttttttaataaagagacagggtcttgctctgacactcatggtggagtacagtggcgtgatcagagttcactgtagccttgaactcctgagcttaagcccaagtagctgggaccacaggtgtgcgccaccacacctggctaatttttttttttttttttttttttaacagagatggcatcttgctatattgaccaggctggtcttgaattcctggcctcaagcgatcctcctgctgcagcctcccagagtgctgggattataggcatgacccacctcaccaggctcgtttcctgcatttttaaacttaacattaagtgttctcaagttgtttaattttttttttgagacacagtcttgctgtgtcacacaggctggagtgtgcagtggcacaatctcagcttactgcaacctctgcctcccggtttcgagtgattcttgtgcctcagcctcctgagtagctgggactacaggtgcacgccgccacggctggctaatttttgtatctttagtaaaggtgagttttcaccgtgttggcaaggctggtcttgaactcctgacctcaagtgatccgcctgcctcagcctcccaaagtggtgggattacaggcgtgagcccctgcgcccagcctcaagttgttaaattctttataataatttgtaatcactgtataacatcattcatgtggatgcttcataaattactaagccattcctctaaagtagagagtttttttaaatattatcaaaaacgtgatacttaatgtttattctttttttcctcatatcttgaggctagattcagagtaagacagtgtaaatgttttaaggctaataataaaagttgccagactgttttccaaaaaggccatgactgtacatttaccaacagtatagcaatgctgggttacaggaccttcatgagccagtatcattgatcattttcacagtttttaaacttgtgcttctttcatagacaaaaatgtattgtcatgacaggtttgattgcacttcttgctaactagaggttgagcataatgctatgtcttcatggttcgaagagcacaggcaatgccttcttttttaggtatagtacattgtaaaaaatgtgtctcagaggagaccatcataagatgaaatttttttttttttgagacagagttttgctcttgttgcccaggctggagtgcagtggtgcaatctcggctcactgcaacctctgcctcccaggttcaagcagttctcccgcctcagcctccaaagtagctgggattacaggcgcctgccaccacgtccagctaattttttgtatttttagtagagatggggtttcactatgttggccaggctggtcgcaaaccctgacctcaggcaatccacctatgtctgcctcccaaagtgctaggattacaggtgtgagctaccatgcccggcctgatgaacttctttccataagaattttaaagtaacaaaataagcgcaaaagtgaaacaattgaaggatatttaatgcaaagttagcatcccacccccttcactcccacaccctagagtcaccagtatttgctgttctcctatacatttaatcgttgacactttatatacagctatttctaccattcatatatcagtgaaaacaaaacataagcagcaagacatgctaagcagcaaaagggagagtcttttcctttttctgcacccagcagctctccaggtcctcaggggaagggccctctggtcaggctgggccctgagtgaaggagggaacttttccaggtgctccttgtcttctgagatgttgggcccctcttgggatggagatgaagcagaatccactggtgaaatcattagacttggagacacagcacacaccttttctctaagaagtaatggtgagtagttaaacctgaagtatcagttattattcaacatacaactataaaaatgtaaatggtatgtaggagtgtttaaaattgagaagaatagagtgytaactggacatgggatttgaaattccagaatatcccactacccattaaatatgaacacttatctgaagtcgcaggcatatgggcagataagtccaaggcaaataagtgtatgcaaggttattaggtaatttgcggttccttataacctgggaagagaattatggatgcagcttatagtctggtcacgctttcagggtattctttaattgtagtttcctgaactggtggttgactcacttttttcattgtttgaaccaataagttcgtatatgcagtagcaatttttcttctaggcttcaggccagatttccaacagcctattgcttgcacatagtagacccggatatctttcaagccccaattttgagcctccaaccttgccctcctccaatcatcctactccatcctgtccaccgtggcttcataaattactaaaccagtatatggaccacaagtcttggaatgttctcccttacttttggttcctggcaaactcaccctccagtagaccaaaaagctatgcttgccattgggataggcacagaaacggaaggaccagagtcaagtgtggatactacaaaaatgtttcttgaagtaggagaatcagatggattgattgggaatggaagggatggtgattgcagaaacgggttctgtgatgtcaagtgctatgtaaaaaagatgttactgtaaaatgaattacttattttaacattataagtagagaggggaattgtgtttaagagtaatgcaattaaggcaaaggaaaaaagattcagagagatgcctggccaaggtgtttgggtttgatgtgataaaagggcttatggcagcttcctttcatattgagatttaaagtgtcagataactgtcatatacattcacaggcatctaatttaagcttcaatatatggaccatagtcttttttttttttttttttgacactaggtcttgctctgtcacccagggtggagtgcggtggcgcaatctcggctcactgcaacctctgcctcagcctctcaagcggctgggattacaagtatgtgccacatgcccagctgatttttgtatttttagtagagatggggtttcgccatattggctaagctggtcttgaactaataacctcaagtgatctgcctgccttggcctcccaaagtactgagattacaggtatgagccactgcgcttggcctggaccatgagtccatgtttctggtactagctaagaccctaactctggtgtctattcataccaagacatgtccataaaacagccagcatttccgtaactctggcatctatttttctaaagctaaataatgaaacattgtatgaaactttgcttttaaattgtataaatgattctggattacaaaatggcatcttactttctgatagcaattaaaaataattgatattatggcccgtcacagtggctcacgcctgtaatcccagtactttgggaggctgaggtgggcggatcacctgaggtaggagttcgagaccagcctggccaacatagtgaaaccctgtcacaatacaaaaaattagccaggcatggtggcgggtgcctgtagtcccagctactctggaggctgaggcaggagaattgcttgaacctggaaggtggaggttgcagtgcagcgagatcacgccattgcactgcagcctggcgacaagagggaaatgctgtctgaaaaagaaaaataataattggtattttgagcagttggaccaacattatttcgttcaacattatttaatatttgtttcctgagtacaaaactcttggcttttagtataatgttcagcaaactattttgatagttaaaaattttacctttaatattttctttcctaggtgctcaatgtcctaatgaaatgctgtctaaaaaagccttagcctcaccaagttctaaatcacatgaagatatgttgtaccctcctagtgttttgtccaagagtaggacatcytttgttgaagacagtgagttgtaatggatgttagttctttactgctgatgatcattcttggggcaattgttgttgccattagcctttttacttttattgctgtatatgagatcctttttggtcttacatgatcttacttgtaaatgtttgctattaattatggtatctgaattctgcttaacatggtctttggttgcatatttttgcatccactattttattatctaaattctcaccacttaccttttttttttaatgggacagagtctctgacacattagtacatctattggtggtcttcatattattggtaaataacaaagtatagtaactggaaaaacattctttttttattgtttcgagacagagtctagctctgttgcccaggctggagtgcagtggcatgatctcggctcactgcaacctccgcctcctgggttcaagcgattctcctgcctcagcctcccaagtagctgggattataggcgcttgctaccacgcccagctaacttatttttagtagagatggggtttcaccatgttggccaggctggtctcgaactcatgacctcgtgatccgcctgcctcagcctcccaaattgctgagattacaagcgtgagctcccgcacccggcctggaaaaatcattcttgtttcttattatcatctctggaattttcatatggtagtaatacataaaaatattactgcctaactggttttgtaacgtggacgaaccataattcacataacataacattcttcaagccatttaagttgcttccagtttttaaagtaactttcagggaacagttttatgataataacattaaaattacatccggggccagtcatggtagttcacacttgtaatcccagcactttgggaggccgaggcaggaggatcacttgagcccaggagttggagaccagcctgggcaacatagcgagacctcatctctactttttttaaaaattaaaaaaaaaaaattacatcctaatttaattagatccctgtgtgctgaggctatatccctggtttaattatttttttatgtgctttgtcttaagtttaaaaaatatttctaatgtatgtgaacatgtttatataggtatgtatgtatgtatataaaatggtttatttcttagaattgcatcgtaatatccactttaatttgtyttactagcggaaaccctttctgtgagtgggattccaaatgctaggaagctaggggagcctatccgagcagctattcctttacatccaccctaccacccttcagagcctcgagcaccctgccccataggaaaagaatacttgcattcaagtcactgctccccagccgtaaattctactggagagcatacggaattttctggggtaagyggaaaagcttactttcagttggctagaagtacacttgtatgtatgtctgtgtgtgtgttggtaattgattagaaggccgtgtgtgtgtatgtgtattggtgaagtctttattctttgtcaaggaagcccctatatttaaagaagtctgctagaattgtcaagcatattgcactagtcaaagcatcgtactccttaaaatttgcctctgtatacacctgcacattcttgttctaggaagataggagaaaaacgaatgcatataaagggaaataataagagccaacacatagtgaatgtttatgttgtgccaggcgcagttctggatactttaggggtattgaataatttactgcccataacaactctggagtagctactatatttatttattgttgggaagctgatgtagagagggcaaggttacacagcaattacagagtcaggatttgaacttggacattctggcttcagagtccatattgtgtccgtaatttaataatttcaaatttagaaaacacagagtggaaaagaaaataaccatccatgcatattcccattatccaccatgaaccactgttaacatattgatctatttggttcaattgcagtgagccaagatcacgccactgcgctccagcctgggtgacagagtaagacttcatctcaaaaaaaaaaaagaaaaaaccttttttatatagtcatcctgtccttatctttctaaaaagaacaggactgggttcggtggctcacacccataatcccagcactttgggaggctcatgtgagtgccagagtttgagaccaccctgggaaacatagtgagaccttgtctctgctaaaaatagaaaattagcctggagtggtggtgcatgcctgtgatcttagctacttagtaggctgaggcaggaggatcacttgagcccaggagcttcagtgagctgtgaccacaccactgcattccagcctgggcagcagagcaagaccctgtctcaaaaagaaaaaaataaaataagaaaaacaacaggcaggtatgtacacagggtagatatataaacagtgatacattttcattatttaaacattcaagcaatgcattaaaagtacagagatgaaataagcattattaacaataggtgaccacattctcaacattctgtgcatctaaacaggagagggattagataaaaagaggtgttaaaatggagtcataagataatgtttacttttgggggaatcatagtgggggttttagagatatttctgagttggtaatactctgtttcttgacctgggtggcagttaaaggggagtgtttattttcaaataattcattgagctagaaatactttattttaaaagttttattaaaatatgattatattttagttgctatttagtaaaaggttgtttgttttatttttttttgagacagagtgtcgctgtgtcgcccaggctggagtgtagtggtgcagtctgcacccactgcaacctccacctcccaggcaagtgattctcctgcctcagcctcccaagtagctgggactacaggcacacgtgccaccacacctggctgattttttttaaaaatatttttagtagagacggggttttgccatgttggccaggctggtctcaaactcctggcctcacctgcctgcctctgcttcccagattgctgagattataggcatgaatcaccatacccagcctactaaagggtatttaattttactttaatagaaaaagataatgaagtgaaattaaagatatcattaaacattaaataaatggccgggtgcggtggctcacacctgtaatcccagcactttgagaggctgaggtgggtggatcacgaggtcaggagttcaagaccagcctggccaagatggtgaaaccctgtctctactgaaaatacaaaaattagccaggcgcggtggcaggtgcctgtaatcccagctactctggaggctgagtcaggagaattgcttgaacccaggaggtggaggttgcagtgacccaagactgcaccactgcactccagcctgggtgacagtaagaccccatctcaaaaaacaaaaaaacaaacaaacattaaatgtttcttcatcacaagaagtattttctaaaagattatctctaagaccaagaaataaatttagccggacacggtagctcatgcctgtaatcccagcactttgagaggctgaggcgggtggatcactcgaggtcaggagttcgagaccagcctggccaacatgcgaaacaccgtctttactaaaaatacacaaaaaaattagccaggtgttgtggcatatacctgtaatcccagctactagggaggctgaggcaggagaatcgcttgaacctgggaggcggatcaagccattgcactccagcctaggcaacagaggaaaactgtctcaaaaaaaaaaggaaatttaaaatgttaagggtttatattcatattttgagaggtgttgtctttgttttaactgtttcaattttggacagcctttattgacattgatacaaaagatagccacttgaatactttgtactagtgataatttttttgttgctcaggtatagtggtaatccctgaaatttcatatttagagaacacctggcctgtgtttttatttgaatggcatcctgagccacatttgttctctgagcacaagtttctagacattgctccagtcctttggtgcactgggtgtcaatagggtcttttgacaaatgcacttcaaaacacggagattgaaggcacgtagctttgtgccacagttcctcccttcctcactcccagaaagttcatgtttcttatttgtagctttttcaaatcaactttttttctgtttttaataggatctagatgatggacttttcttaatttccaagttgcctaaaggcagcaaatgggaagtatatccagctcaggtccaagggcctaggacaaggaagcctcccaaaggaaaaaggtaacattactgcagacttcagtgtytacagtctgtttacaaaggaatttgaaartgcaggggcatgatctccaaatttagctgtgaagaccagaatgaagtatttgttaaagtacgtattacagttattttaaactaaataatagacacctagctattttactgtcaaatggtcacttttattacagaaatgaaaacagagctacagcctcatcctgcaattcacctttcccccagaggccaagaaagagattaacagaacaagaattacatgatgtatcagaaaaactctctcagcggctttctgaactagattgggcaagtcttgttttttcatctatattgagattcccatgggttaagtgagcatttaagtaatctctcaattgaaagtgaggtattagaaaattagttgtgtcttattaatagttactgtgaaaatgttccgtaagtcaagcaggtagaacaggaagtgatctctcagcgtttcatgatctaactaaatttggtgcagatttatccaaattttattgaattctgatgaaaactaaatcatttaacataaacgattatgttaagccatttttctttagatatgtctttatagttcccctttgccgctaaagacagatctggtataaaattggatggatcactgattctcacaaaatacaatattacagttttaaggtatcattgaatgaatgttttaaatccctacgtgactttttctaaagtttattgaaacttagtgatccatagcactgatatacacctttttaaaactaaacatgtatgccaggtgtggtggctcacaactgtaattccaacactttgagaggctgaggcaggtggatcacttaagcccaggagtttgagaccagcctgggcaacatggcaaaaccccatctctacaaaaaataaaagattagccaggcttggtggcatatgcctgtaatcccagctactcaagtggttgagatgggaggatcactggaacccagtaggcagaggttacagtgagcccagctagcaccactgcactccagcctgggtgacagagtgagatcctgtctcaaaataaaagtaaataattaaacatgcataagcgtctgaaaacttgttattagtgactgtcaaaggaagcttttttaaaggtctgcctactcctacgaatttacattctgctgaaatcagtgaaagatgttgaaaagaattttctcaatagatgttaaaaagtgctctgggtgatcggattaaagaaaagactgaccataaagaagaaaatactggaaatgaggaggtagaggatggaactgaggagacactgtctcagcacagtgatggcatcgtggagtatgggccaaagaagtcaaggccaggtacttaccccagagagactgagaagggggacatccatgtgaactacttaggcagttccatctgttcttaataacttatattctaattttaaatagttgagaaatatataaaaggatcaaaagtaatatcaaacacctggatcttccccatctagaagtagcaagtgttaacaattatatttgctttagcccctttgtgtttaagaaataaaacagtagaaaccccctctgctctccccacagatctcttttccccaccctcagtgcaaccactgtcttaaagttggcatcttttcttctgatccttgtttttatactttaagagctcatgcattacttgtctaaacatagtattgttttatgttgtttaaaaatttacatactgtatatattattctgcaacttgcgtttttttctgacattgtcttagaaatctatttatgttgatccttacagatccagctcattcattttaactgcagtgtaactgagttcttacagtgtgtcacttttgtgtgggtatatgtatagcagtatccatttcccctactgctggacatgactgagttcttgcagtgtgccacttaatgtgtgtgtgtgtgtgnnnnnnnnnnnnnnnnnnnnnnnnnnnnnnnnnnnnnnnnnnnnnnnnnnnnnnnnnnnnnnnnnnnnnnnnnnnnnnnnnnnnnnnnnnnnnnnnnnnnnnnnnnnnnnnnnnnnnnnnnnnnnnnnnnnnnnnnnnnnnnnnnnnnnnnnnnnnnnnnnngcgtctgcagataccacacacacacgcgtgtagcactatctatttcccctattgctggacatgttgtttccagttttcattactataaaaattctgcaatgaacagcctagaatatgtgtaagagtttctgtgatatctccatctagtaggattgctggatcataaggcctacatttcttcaccactgccaacttgcccaccaaagtgattgcactgctttatactcgtatcagcagtttctggtttgccgtgtctttgcagatacttctactgtttgatatgccattgttcaaatccaattatcctgtcttccaccaactaaaatcctgcatattttacatttagttttatctactttggtcatccattgtttcttcagaaatagtctttttctgatccaacttccttaactttttcagttgttttttactccttcaagaatgctctttccttctcttgattatttcctctctcttccctttaaaaggactcagctaatttctaggcaccctcatccaggaacctcttcctttccctttttatgtacatacacatggtatcctattgtgaaaacaggttataaattaaaatattatttcaagtgcgtcttcagtttctagagaaaaatacatcatgagcagctatcatttaaaatagattatgcaagtcagtttttaaaaatacatcttagaatttgaaatgtgaaagacttgaattaaaagcatgtgaaaaaaataataagctcggaaaatttatttataaaggtaccaaactagcttccttggtcttaaggctatgttgaagtgcttttcccactggagtcaccctcttcacaactagcagatccccagacacacctatagacaatgggataaaaaggtttgtagaaggaaatggtttattagatctctttggcagtgtgcaattaggagggctagattgctaagtagggaaaaattgagaccacttagacaatgcttaacacattaactttgcctataagcatatataataagatagatatgtatgcttacatcccaccttctcaggacccagataggtaaaaggatagcagatgcgtggctcagataatttaccttttctctctttgcatctccccctatcaccaagagcactctccatagtcctttgtgcataggaggcattccacatgttgaatatccaaagttgaatgtagaagctaagtatttgagacagtacacatttgtatgcatttgtctgtttacttggtgttaccataccaattcaagttagttacaggagagagtccctttagcacattcactcatcagtctctttggatttagtgaaaaccaactttggtttccagcataacattctggctatcaggaactaatgttatatgtcttttctctgttgcaggactttccatgcgtagaaagccaccctacagatcccattcgctctctccatctccagttaacaaacacaaacagttccacttggagagaaaaaggcagcgcaagccaagagaaacagatgtccgccaattccaagcacaggttcttccccatctcttgactaccattaagcagcagccagtaccatttcccctcagccagatgctaccatgaacatgctgttgatttaggcttaaaatacatttaatattcttgagcggagtggatgatagagagctatgtgacatagcttatgtctttgttagcataaaattatactcatgaaactcttaaaaaaaataacctggctggacatagcttggtgttccagtagattaagaaagaggagatcagtgtgagttgttattttcagagtgagcttcagagaagaagggaatttgaggtggattaaacgtgaaaggccacttgagttacagagaagatgagatcaagtacccaagacaggaatgagaggaggtggttgggattcaacaacagggagattggtatgattacctaggaagactttccactgtggaatgtggattttgaaatgtagcatggatttagaacacttatttgcagtagtaggttttataatgcggtaggatttataatggtgaaaaactaaaaccaattcagacatcttacactcatttgtaactcagcatgtaacttccactcaggagagtatcaaaatgattgcaaaaacttgagaacagaaaaaacgcatgatgtaaaatttcattttatgtcccaattatatatgttaaagtaatgtagagatttgtgaggcaggtgcagtggccctgcactttgggagggtgagacaggtggatcacctgaggtcgggagttcgagaccagcctggccaacatgttgaaaccccatctctactaaaaatacaaaaattagccaggcatggcagtgcacacctgtagtcccagctactcaggaggctgaggcaggagaatcacttgaactcgggaagtggaggttgcagtgagctgagtttgtgccactgcctccagcctgggcgagagtgcgactgtctcaaaaaacaaaacaagaaaaccatacatttgtgatatagagtctgaaaggaatttttttaaaaagtgaatgagcttgatattttaggggtggcaggtatcctaggtgaatttttttcctcttttgtattttttttttttttttctcaaggtggagattcactcttgccgcccaggctggagtgcaatggcataatcttggcttacctcaacctccgtttcccgggttcaagcgattctcctgcctcagcctcccgaatagctgggattacaggcatgtgccaccacgcccagctaattttgtatttttagcagagatggggtttctccatgttggtcaggctggtcttgaactcctgacctcaggtgatccacctgtctcatcctcaccgcacgcggctaagagcttggatgctcggttgaggcaccattggaattgaaactcaggatctcctgtttactagacaggtgctttaaccagctaagccatggtgctgcccrttgtgtatgtttttaataactgtaatatatgaccttttcccctttaggcgtttactgaagcatttgaaagggaactaagaagacataaagttcaagagaatattggacctctaagaatacatgagaaggaggaggaaacagtgggtaaaagtctccactgtaataaatgccatttgatcagatgagtgggaagtacaaagatgatctttttaaaagaagaaggggccaacagggccttaatcatgagctctttaggaaaaggcaggatttcatgtcatgatacaggacttgcttattaataaggcattcaggttgctaaaatatgacgagacatggttccaaagaaaagtagtgtttttccgctacttaaaacttcccatcagtttttaagggtttatttgacttagcagttcaccaggggcttaaaaactactctaggctgacaaaattaaagaagagtaagagaagacagaacatcctagttggctatagacctggttgtaagaaacccaaaacagaagttttcattgcctttcaaaagaatggttacagaaactaagtgaaatcatggggaaaatgcttatgctaaaatattcatgaacaaaacaggatataaagtacagtatggttacaactaagcatactgcatagttgcctgagaattttttaaatytacatggaaaaagagaagtacattgaaacattaatggttaaaaaaaagattaatagtggttgtatttagggtgtgggactatggtgactgaaacttgaaaaagattcagtgctttttcaaattccaagggatgccagaggccaaaaggtgcatttaacttagagtaaatgaatattaaccagattttacaaatttgaagtaaggtggtttggcttactgttagctaaaaaactaaaaaactaccgttagctgtttttgtcagtatgtaatatttaagatgatgtatgaaagaactgttagaccttttatttttattctgttttatatctgcttctaaggaaaaaatatacagaggagaagctgttcgtaaaggaactccagaatgtagtcagccctggaagatttactctagaaaaaccacaacgcagagtctaagaggtggcctcccaaagccaaataaagcagttccaagtaagaaccacagaattgtactttatggaaaactggcarcctttgaaagcatgtgcaacattccaaggacacagcactgaaagctaacatccaccagttagccgaagaaagttttttttttttcccaatcactgccatgtggctggttttccgtagagggctaaaactcttcaataaggaagtacttcagggaggcctatatattggcacccaaggaatgccaggactgccacctgctgctccagcgttagcctcactcgtgtgcttactcactttgactgcctttttgtctatttctgggaggttggtagaatgaaagggatgctccaaggcaagcagatggcctgtccacctcctatatattgacagtgccaatgagtgtagagtcttgttacaagaaacaaagtcatgagaaatgccaggcttcctgttacacccaaagactgctggccctcctactctatcctttagaccagaaactttttcttctaagcacttgcctaccgggaaggttgaggagtcttgttttaccgtacgtagagaatctacccacaggcactgaagcggctgagcaattaggatggacttcccaggaccagcatggcatcaatccagaactattgagcttatttttatccttaccagtagttggcttactccaatcagaggagtaatgcaaattattataagtacatttagaattgttcttttcaggatcaaaaccacatcacttacataagctttgatctaccagggatgttggatgacagttcttgtccacgtctcagattaagaacatcttattttaccttgcagtgaaagtaagtgaacacagtctcctgccccttatgctggagcagtttccgtttctttatgtttctggcccaacactaagcaaaatgtggaaacagcaaattgcacaggttgaacagcttaagaaagaagcatgtagagaaaatcgatcaaagaagaaactccaagatgaagtaagttactgtcagtcttaagcataggaatttaaatgagaagagcttatccttaagaatttagtgaacagcattattaacctacttaacttcatgtcccccttcaagatagaagaagccctaagaaggcatgacctccttactacccttgtcaagaaagaatatgaacataacaagagactggtatgtcaagagcaagttgggtattataattctgaatttgttatattcattccctttatctgtgctagctgggcaacagttgcacagacccttaacctcttaacacctgcatgtggaagtgttgcctaggtctttaaccaaaattgatagcccatgcctgtaatcccagcactttgggaggctgaggtgagaggatcacttgagaccagcctcagcaacatagtgggaccctgtcattaaaaatatatatatgggtgtggaaaaaatgagcctggcatggtggcatttgcctgtggtcccagctacttgggaggctgaagtgggaggatcacttgaacgtgggagggcgaggctgcagtgagctatgatcttgccactgcactccagcctgggtgccagagtgagaccctgtctcaacaacaacaaaacacacaaacccaaaatgggcaggaggaagagctaggtactttatatacacagtttcagttagtcttcatagtaatgtattagagatgttttctatgaaatgaaaaccctgaagctttgagatactaagtaacttgccctgggtctcactgataagcaagggacacagctgagattttaatccagttctgtctgtggactccatggacccatctaggtgccaagcagctgaacttagtgctgtttgccctctcccatccttctcaggtcccaagtagagagctccaggatttatcagcctccgttataattttgactaggaattgtgcttagagaattacgaagggagaggatggaggtcagaaacaatctgccaaagggagagatttaaaaatctttgcctgagtgtggagtagagataagccatgagaactgtaatactgaacagttccaggaagacatctcaggaactgcagatggtactttcctgtggagggaaaaaacactagtatctgaaacacctacataagaggctttatgtacatgaccccattttattttcactcctttgtcagatactgtctaatttccttagtttttgcctaaatgctcctggcagctcaggctctgcttgaaagtctgggtgtgccattttcctactccttgtgaggtggcatctgggccagccttgttagcagcttcctggtggcatggggagtgagccctcagttccacaggagtgcccaggatcactgctgccctctgctgcagtggggtgttattggagctgctcttcagattgaggtgataaagctgccaaaggctgaagggcttctggggccactggccccccacacgtgacatactgcctgaagacatcgtgatggggagtgaggcagatgagaacgctggaatctgcattcctcttgtccttacccttctcttccctcccctttccctttcttagcaagacttcaaggactgcattcgtaggcaaaggttgacccaatcaaagataaaagaaaatcgacagcaaatcgttcgtgctcgaaaatattatgatgattatagagttcagttgtgtgcaaaaatgatgagaatgaggacccgggaagaaatggtaagtctgacttttctgtccagccctgttaagaaggtgaactttgttatctttcaggaccaccttctttgttcgtgactcttgtccaaatttgaatccaaaatctaaactgaagtcctatagtgctggccctgagttctgcttggccacacttcattttcttactccattgtgcattcccgtccattctcagtctccgtgtccctcatcttaatgtgaagtcttacttcctccctgcctcctacacataacaggtacttctccagtaaaactactttagaggtttgggaacatgtgagagacaaatttagtgtgataacatgaccttgcattccacataaaatcaggactagtgtccagctgtgctgtgaggggttttccacaaggatgacatttgctatgtcatcctaatcaggctgtgaaatgattaaccttttgagatcccaagctagcaataaatttcatctgtaaaatattttagtaattatagtttactaaagacttggacatatttctagaggaaggctttgaggagagcgtaagtaacttgtctgtagctcatgaatgcgtcgccgtcagaaccagtttttctatccagaatttacactgatgaagggaggacaagtgcgcatatccaagccctttgagcagtgtgttttccggtggcctccccaaatgatcactccccctcctcagtgatgtacatgtgtaggtgtggcatgtttctgctcttggcgttcttaccctatgtacatggctgcttgacactgcttttctgaaggttgtaaagaacctctgtgatacatgaaaagataatgaacaccttcgtcattagggaaatacgactcagaaccacagttagaggacgagtgttggcaaggatgtggagaacttggggctgtaaaatggtgcagctgctttggaaaacaatctagcagttcctcagaaggttaccaaaaggtcatatagagttaccctatgacccagcaatttcactcctagctatataatcacacaaaaaacacaaatgttcatagcattacttataatagcctaaaaggggaaacaacccaaagtgtccatcagttaatgaatggataaagagtgtgcattcattcatacagtaggatgttacttggcaataaaaaggaatgaagtattcatacatactgcagtatagatgaaccttgaaaacatgcggagtgaaagaaaccaaatacgaaaggccacgaattacatgattccatttttaggaagtgtccagaatatgcaaatccatggagacagaaagtacagactggtgactgctaaggatgggacagggggaatgagcactagtcagtatacggtttctttttggggtggtaaaaatgttctgtagtggtgatggttgcacaactgagtataataaaacatactgaattatttattttaaaagggtaaggctggactcagtggctcacgcctgtaatcccagcactttgggaagctgaggtgcaaggattgcttgggaccagcctggrcaacatagtgagacgtcatctctccaaaaaattaaaaatttagccaggcgtggtggcacatgcctatagtcccagctatttgggtagccaaggtgggagaattgcttgagcctgggaggtcaaggctgcagtgagttgtgactgccccactacactccagcctgggtgacagagcaataacctgtctcagaaaaaggaggtacattttatggtatgtcaaaacatctgaataaaactagtatttaaaaaaaaaaaaccttgggaaatacaatcagtatatacctctagttggccaaaatgatattcctcaatgactatttttacgattaaataactgacagatatttaagaaactgtttgaagaaggtttaaacattcaaaagcaaagattacgagacctaagaaactatgccaaagaaaagcgagatgaacaaaggagacgccaccaggatgaactggactccatggagaactactataaggaccaggtgggctcctggcacttgcttacgctgttgtgcttagtcctgaccacttgcccttgtggcaaaacttgcttagtctgttgacaataaaccttgtgttaactgaagtttgcactctacagattagaggaccccatttcaagattgaaatttaagatcaaataatacctgaccatagtacagtatatttccctatttccattaaaatgattttaagcctgtgaacattaagaaatgttacatttggactacaaacattaaatataatatttgttttttttcttcctataaacagttttcattgctggcagaagccatatcacaggaacatcaagaacttaaagccagagagaaatctcaggcccaggtaataattaagatagaagccaagtcatgcactgcatggcaatgtttctttcagcaagggacctcgtacattggtggttggagcaataggctgtatcatatagccccggtgtgcagtggactgtactctctaggtttgtgtaagtacactgacattttgcacaacaacaaaatcatttaatgatgcatttcttggaacatatctccatcattaagtgacacatgactaatttacatttttaggaagtagaaaaccaaatgtattatacctgtaaagggaatggagagaagactaataaggcaatccatctatgacccaagacatttttatcctatgattttaactttagttaggtctctgtaagagctgctgttgctagattattgaaaattttggaggagtttgattagctggaagatggagagggaacaatagatgagggcctggataaatgctgtgaacagcgggatgacatgccttcttttttcagacattacataaggtgaagagggagctgagatctaagatggagaaggaaattcagcagctgcaggacatgataacacagaatgatgatgatgttttcttccgggaactggaagctgagcgcttcagatctcggcttcagctggcttcctttcagtacagtaaaagtccctccctatgaggccagacttgataatagtaggtgaaggttctggaggcctttaccaggacagagctagaatcgagccagtaaacagtctaagccagaaaaataattttcaaatgctttacctgtattttcattccagtactttttatgattttttaaataaaaattgttttctaaaagcttattgcttttgaatttatgacctgacacctgaaaaggggaaaataatcattagtcgtatttgtgctaaagcaagtaacaagccttgtgtgagcagccagctcctgaagtttgttgctttaagtcaacaaaaataattaattaagaattagcacttgaggacaaaaaaatactatattatttctgattcatgagagaagaaaggtgggtggttatcagaggtgggcctcggagaaccttgacaataccatgtatgtgtagacttcataacatggctggacgatgagagactatgcattacggcagttgggtgcagaggctcatgcctataatcccagcactttgggaggctgaggcgggtggatcacttgaggtcaggagttcgaaaccagcttggccaaacctggtttccctggtttagtacagagatggtgaaaccctgtctgtactaaaaatacaaaaattagctaggcatggtggcactcagctgaggcatgagaatcgcttgaacttgggaggtggaggttgcagtgagctgagattgcaccactgcactccagcctgggcaacaaaagtgagactctttctcaaaaaaataataaaaaatgcattatggtttctgttggttggcagaagatagatagatagatagatagcagtgagaagagatagatagataaagggtggaaagccaggctgtcattcaaagacgcattagtgacttgaggtgggaaggaggcatgatgatgggtttcaagtgggcaagagtgcaccagcctcatatctggtatggaggaatacgaggaaaaaaaacccacttgggggcggcgtcatcaatgaaaagggaaggctacacttcttttaagctagaggaagcttcagagcagttgaggatatggggacttggaagccagggagtggcagagagaggcttccattagagcatagagagtgctgtgcggatgagtgtatgtatgatgagaggccaggaggcctgaagcagtgaaaactgacctagagagaagacatctggatcaactgctgtggttccaagtgctgagctcttggaatggaaactggcagaagggtgggccaccaggcaggcgggagcttccagcggggaaaggcttgatggactgggtgtgtctggagcacagtaaatgacatacagacccctgtgatgtgttgtgacaattcagcaagcacaggtgaatggaaaggacaggaaatgcacaagatgaggctagatacgcaagagctggaacataagttctaaaaaatgttaagcagaagataaagtagatctagatagccataaaatactgagtaaaaaagttttagactacaaaatacgcagttttatagaaaaaaacatggtatgagtgggtattatacatatgatgcaatataaatatgatacagaaaagatccggaagcatggcagatgtgactcttgagtggtagattatataataccattagatctgttaacacaagcctaacgatgcttttattatgatttttttttaaatgtaaaatattttaggaagactgaagttgctagttctggtgattggtgggaactggtgctctttaccaagctaaaaagtaaccaggaataaacaacaagagaaagaatttatgagagaattggtcagggaaggaataggattgctcagcaaaggtcagaaaataggagacaacatatttttgaaaaatcaaaagcaaataaagatcacttcaccagactagcttagcaagcagaggacagtgcgattcaagtgctgtggattgtgtgcatcaagccagtcagcgtggagcagcccaggaaagattcatcacagtcatgcatttggaaagtcctgtggggggtgttacagagtgaggtgcttggtattagaactaaatgcctcatctatcataagggactaaccagacaatatttaaaattaatgaaaagccctgcctggccaacattagtgaaaccccatctctactaaaaatataaaaattagccgggcatggtggcgcataccctgtaatcccagctacttgggaggctgaggcatgagaatcgcttgaacctgggaggtggaggttgcagtgagctgagattgtaccactgcactctagcctgggcaatggagcaagactcctaccaaaaaaaaaagcattaagaatacttaagtggggaggagaaacatcttaggttcccttgccaatcccacagactgcaccacagcgtggtggtgctcacctgtagtcccagccacttgggaggctggcataggatcaacgtgagcccaggagtttcaggctacagtgcaccatgactgcgcctgtgaaatagctactgcactccagcctggacaacacagtgagaccacaaacacacattcaagtctgggattcagggccttgctgaggtgggtatttactcatgtgctcccatcatgactgactttgctgtacataaattgagctttgagcacttaagtttgaacttggcccacagtgagacacagactagaagcatgactttggaagttcactttctaaccaccatgcaaagctatatggctatcagctagtacagagcctggcatgtagcaggagcatagtaaatatttgttgaatgagcagcagacaagtcacatttagggcagataccttttaagtaaaatttaaaatctggtctgtctagtttgctacgaatgttaacataggaatgtaaagtaacacttctcctgcgtgattacctcctttatcctgttactaggctcttgttctgttgcatatatcttattgtgtgtatatatatatatatatatatatatatatagtaagcatttggtatatgaagtacaaatcaatgcagtgggtaacatggttaaccttcattacaatgaagggacaaacttcaggttaaacttctgatcattagtcaaatcaaacttggataatttgtagactattataatactaaaaaacaaaaaattgtttttgagacaaggaaggtctcagtctgttgcccaggttggagtacagtggctcaatcatggctcactgcagcctcggcctcccagggctcaaacaatccccccatctcagccccacctccagtagctgggactatcagccacgtgccactgcgcccagctagttttcatattgtttgtagagatggggtttcgccatgttgcctaggctggtctcaagctaggctcaagagattcacctgctttggcttcccaaagtgctgggattacaagcgcaagccacagcacctggcctaattttttttttttcttttcctgagacagagtcttgctctgttgtccaggtcggaatgcagtggcgtgattttggctcactgcaacctctgcctcctgggttcaactgattctcctgcctcagcctcccaagtagctgggattacaggcgtccactaccacacctggctaatttttgtatttttagtaaagagacggggtttcaccatgttggccaggctagtcttgaactcctgacctcgtgatccgcccatctcagcctcccagagtgctgggattacaggcgcgagccactgcacccggccaaaaatctttaatgtactaaaactttataaattttagataaaaccagtaaacacagcaatgagggacaaagcaaaacaaaaatattcaaaagaatattaaagcatataaacaaaagcatgctcaccctttgaactttaatacactgctactacttacacatttcccaggtgttcccttctgttgtaccctatgctgtgtagacttacacagaccatattcattccttttctatccatagagttagctggactttagtccactatcattaatacagtagtgaattataaaccttaaaatccacagcttctagaaaaaatacaattgatttctccttttcattttgagaattttactgctcgacataccaaggtagggctggcaaatatgagcccctgtcataggcctgccctacagagcggagatgtattatagcaaagatggttgcagactggtgacaggaccaagatgctcttccccactagcccctgacccccctcagaaatccacctatgcggtacccccaacaggtactaccaactgagcagtcaccacggccggagaaaacgggcaccttccctgctctgcgaggagacagaaagctgagctctgcaacatgacagaggcatcaactcaggatggcatgtgttcttgaacttttcattttgtgactcatgttgtcaccctccatagagccaaccataaatgttttcaaaacgattcattacaaactcaatattctttaaaaacgttgatgctgtgacagtgcaaacagcattgattttattgctcgacttcggcatgggcacatacatagttaatttttaaaaaccatttatacagatgttactgataaagctcatgtaacaaatgaatgaaaatacaaagaatatcaaagctaaaacactctgtaataaatacaaatacaatgaaaatgataaaactttgtttttaaagtcagtctgagagaagaatattacataaagtgaactaattacatctagaaataaaacaactcagcatttggaacaatcatcctaacatgttaaataccacaaatggcacccgttgactgtacgcttagaaaacaagcagaaggagccactctcccaaactaaggatggttggaacagcctctaactcccaacaatccaatcagtccaatgcactggaaattcaaagcccagatttagtgttgtaaagtaaagcgaattacattgtatttgaaagaagagaatcttgtgctccggactgtaaatacatgaaagaaaaaaaggcttggtaaaaaacccattcggggcaacaaactatgtgcaaaacaaaatgtacactatacactatacactatgcactatttaaaaactacaccaagatacaaggccctctgaggcaagacttacctctctgtactgcctatgagctctacaaaggaatctctgttcataactaagcattcatgatggaaaggcaagagtatgaaaacagatatcacatatctgaaataacaatacagctagagggaagacaagaaaaaaccagttaagagggacatggaaataaatattcacattaaacatgaggtgcaagtccatggttcaataatacattgggggtttttgcttagcacctatttggaagtaatcgggtaatgtaactttgaaatggaaatctaaatcatgtttttatatatgttggtgataacatagactgttatggagagtaatttcttttttttttttttttgggcggggacggagtctcactcttgtcgcccaggctggagtgcagtggtgcgatctcggctcactgcaatctctgcctcccagattcaagcaattctcctgcctcagcctcccaagtagttggattacaggagtgcgccaccatgcccggctaaattttgtatttttagtagagacagggtttcaccacgttggccaggctggtctcgaactcctgacctcaggtgatccgcccacctcggcctcccaaagtgctgggattacaggtgtgagccaccatgcccagccaatttctttcttttaaagctctattaagtcattagtataaagttaaaaaggcactcaaaaagcaatggtatttgcctgctttatattgtatattaaaataagtgatagtagcatttcattattactgtatccctgtcagttatgatttctgtattcattatgtacttttttactgaaagattttaaaagtaggcacaattataaactgcactagtgctttaatataaaagagagatgggtctgcaaccagtaaagtactatcatgacagctgaacattactgattatcaaatagcatagaaaccacttccatacatttcaagatgctcttcagtactcagaatgcaatgtaaaaaaaacaaattgtttgagaggaaaaag

SEQ ID NO: 97070 - DNA, 270123 bp, Homo sapiens
ccaaggcggaaggatcatttgaggccagaagtttgacaccagcctgggtaacaaagtgagactccttctctacaaaaaatttaaaaatgagctaggtgtggtggcatgcacctgtaatcccaggtacttgggaggctgaggcaggaggagcccttcaacccaggagttcaacgctgcagtgagctatggtggtgtcactgcattccagcctgggtgacagaacaagaccctatttctgaaaaaaaacacaacaaaaaaaaaaaaaaacaaaaaaaagggctcatgttaggacaaagccagataccagacaagaaaggggaagtcaatctgggacacccccctcctttttattttattttattttattttttgagactgagtctcactctgttggcaaggctggagtgcggtggcaccgtgttggctcactgcaacctccgtctcctgggttctagcaattctcctgccccagcttcccgagtagctgggattacaggcacccaccaccatgcccagctagtttttatatttttagtagagacggggtttcaccatgttggccaggctggtctcgaactcctgacctcaggtgatccacccgccttggccccgcaaagtgctgggattataggcgtaagccgtggcacctggcctgggaccccttttagtccatcaattctcacctgtcgacaggcggagcttcttgtaaaggggacaggactcacacaccggaaaagggagactcaagtcgtagtcacagctcaactgtaagaaatcaaaactcatgatgacagaccttagggaagtggtccggtccaaatacaacaaaatctagtctccctcactctgacttacaaattcctttccagtcaaactaacccttcccaacaccccatattactaaagcttcataccggtgggagtacatgctgaagcccagaaagggtggtgagcaacatatcctccaggtggccttgcttggtctccctcagtgcttcacagaaggcatcaaaagcttggggacccctcttaggcagcaagttgaggagttccacattctggctgaaactgcccactttggcctaagacacaagaataaaacatgaaatcatatttacttctctagctataattctatttctccacatgagcttcctagtagtgtcctcatccaagaattctttttacaggaaaagtgtatgtatgggtgaagtcctttctgttattcttgagttatatatcatttctctcaaatgctctacggtagaagggcatttccatttctttagaaaggtacaacatccagctgggtgtggtggctcacacctgtaatcccagcactttgggaggccgaggcaggtggatcatgaggtcaggagatcgacaccctcctggctaacacagtgaaaccctgtctctactaaaaatccaaaaaattagccaggcatggtggcacctgcctgtagtcccagctacttgggaggctgaggcaggagaatcacttgaacctgggaggcagaggctgcagtgagccaagatcgcgccattgtactccagcctgggagacagagactctgtctcaaaaaaaaaaaaaaaaaaaaggaagaaagatacgacaccctttccatattttgtcatgctctattcccaccccatgatcaatttatcttctctcttttgcctccagatacctggatgagctccctcatttccaaggtgatgatgtccttctccagaagatgttctaacaattcgctcaacaacagctgtttggctagcaccactcggttcttttttagagtttcctgatgatgaggatgcatgccacacactcccaatatcctacagataaacggtagaaggaaaggctgtcaagtcacaatttgacacagaagagtggagtggaagaggcatgaataggaagaacaaaaagaataagacttacaataaccaagattatgcatatttcttaaatctggttaaagcaaagatgtactaagcaggaacacattgatcataagaaaataatgtctaattccttatggtttatgttcagctgagatcatctgagatgaatggtctgactagaggagggaaatatctgtcttaagcaaaacaatacccccaagtacacatatttatgagaaggaatacttctctgatagaccaattttaataaagagaattatttcagaaaacatctcacattatctaagctggtgaaagtgatgtaagtttataatgatcttagatgagggttaaaacactatggtaaaaactcaagccaatggctttaacagaaaataaatgaggcagacactaactctctttcactagtgatataaacatataattacatgttttttaaaacttttaagttccagtgacaaaatggcgaatcctgttaagatgtggataagcagaaagtatgacagaaagtcacagtggataggtatttatctatttactttaaaagagtctcactgtgccacccaggctggagtgcagtggctattcacaggtatgatcccattacagagcagcacaggagttttgacttgctccatttttgacctgggcgggttcacccttccttaggcaacctggtggaccctgactcccaggacatcaccacactgatgctgaacttaatgtggacacgtgactggcatagcacactatagcccagaactcctggactcaagcgatccacctgcctcagcctcccaagtagttgggactacaggcatgtgctgtcacctccagctaattttgctacaggcttgcaaagagatcagcttctgcttataaactaaaataatcctattgccaatatgtcatctacatgcctagtttacataaatccagagttctctagcctgccccgtcacattttccacatatgtaacagcaggaagggtggcacctgatagcagtgaaaatacaataacttccatttataacttaaaaacctactctaaaatgcattctgatttctaaggtgttaaaacatgaggggaggccgggcacggtggctcatgcctgtaatccctgcactttgggaggctaaggtgggcagatcacctgaggtcaggagttcaagaccagcctggccaacatggtgaaaccctgtctctactaaaaatacaaaaaattagccgagtgtggtgctgcatgcctgtagtcctagctactcgggaggctgagacaggagaatcgcttgaaccttggagatggaggttgcagtgagctgagatcattccactgcactccagcctgggtgacacagcaaagactccgtccaaaaaaaaaaaaaaaaaaaaaaagggagggaaaaaatgtgtatcttagagtcagtgaaataccacacatctatggaatggatgcacttggcttgcagatgctattgggtgagagatttatagttagaagagggaagagctgggtcctggaagaactgggagaactaagatagcaggtgggatcctaaaacagatgaagtgggttggaagcagccaatgaatctgaggtttggaaaaatgagtctgaaactccattttttcttctttttactgtaatatttccattacccaagactttcaggaaaaactggctacaagaaaaagagctatacaaataaaaaaacctatttaagaatgaatcactttcgaatacgtcaaagcagtaataacgatcacatataacactgcagctgggatactaaccagtggtgcagcagatttcttccattagtttaccagtagtattcgctccttaaatcgttctcttcctctggtttccatgacagcattctttgggagtcttctctctgcctacccagttcctgttttctttagagggcctttggcctgcccttaatattgatattccattagggacgccccttcaaagagcctttccctagacaatctcacccatacttgcaacttactgacttatagttcttaactctctcgagttccagacttgaattttcaatcaactctttagttttaatctgaagcatcaccccctctgcacacccgctccttcctctactctgtagtatgagagtcttaaacgtgaacattataaaagtttccaatcatttagaatttcaggacacaactggaaggggaggaggggcgaagggcaccacggagttcctacgtcttaattctgtgtccttctgcaggttccctttgcgaagaccttaatcttcagtctcgagcaggaggcattacaatgttctcctgggtgatgactgccatgaaatggaatgaccggggcagaggcatggacactcggagccacaggaacccccttgttctgccaaaagtactcaatttccaaaccctgtattgacttctttgaaaatctggtcattctatgcaaagccatgcagatcatgatacaatcgatacaaatcaaatgcacatcaggcagagcaccgaggtctgcagaaggtctcgtcgatttttaaggagacagagtatggtctttttatagtttccctcataagggagccagaggaaaggatgaagaatcttcaagagaacccaagagcgggcaggactgcaaagacctcccctttagaaccctcgtgggttgaacaaagggaggctggggcagtcttttcccacgagagacaaggccaagaggtccgcccgcgggcccttgcgcggagtcaggctcggagcggctcgggcgggcgtcccacccttggcaggaagcgcggacacggctgctttccggggctccgaggggagggggctgcagggccgcacgcctgggggccacgctccccttccctgggctcccctaaggagccctaagaccgttccctacttacctgcgtcccctgtcagcggccatcagctccttgtgctggaaggtggaccaagaccccgcgctcggcgccgccatttcccgcttttcccgggctctccgctgcgcaccgcccacagcccaaacaaaccgggggccgtcgcttcccccacatccctcccctcagacgcggacgcacactgcgcctgcgcctgcgccctgccgcgcccacacaccaggccacccagtccccggcccggtgcgtgcgcaggcgcagagctctagcggcggccgcgcggtccaatggggtgaagtggggtgctcggcggacagacaaaaggaggggaaggagcggggcggggcaaagggcggggaaagagcgagggcgggcgggtgtgctccgttcggcctgggaatccgattggttatcgattcccgcggaaatcaccccggtgcctctcgcgccccctggccggcctatggcgataacttcacggagacgggcgtggctggagttttgctttattgaagttgaacggttggggccaggctgcgaaggagactgagagcgcgacaaggccctggacagatgcccgcgcggggaaggaaggctggcttaggagggggcgtcagctatggtttagcagcttccagcgaccgaaacctacatcacagccgcagcacacaattccaggaaacctggtgctcaatattgggatctcaggaatcaggaccggcggctggggtgaaagcctagcggtcagagcttaggagtgaggcagaagctgttagagactcttcgcaagtgaccccggggctacatatggatgattcaagagggagtctcctcgccagaaagttcacatgtttcactccttctggccttcataccaacccattgttaaaactggaagtccctccacctggggtcactgactccactgttttcagataggatggggaccctgcactggagactgctctctagcccctgggcaggagaggcacagacactgctacgcacgcggagcagggatcaccagcgctttgactgactttgctcgtccaggaggctggggacatgcgtgcccatgctcagcccaccccctctgtagacacaattggtcgcccattctgtttataggaagtcttccatcctgcaccagcagctgtccctagacagggattgggagacatgcaagttgcttggcttcctattaccttgtgttgaaaacacaataggctttgggatcaggagttcattccagttattttaatgttatttactagcagtgtgcmctcgtgcacattatcaaactcctctgactcttggaatcctcatttttcaataataactcacaaagctgtcaagcctaagggttctaacagctcgaacagcacctggaacagaagcaatagccgccactcagaggttacttcttccttctccgccttctctggatcacctccctacctcatcctcaatctaacgctggaaatattggatatggggtaggtcaccaaatgttgccagaagactcaaattatgccacccatatctcagctgggaagggcttaccgtggcctgactctcctcagggtccaagtccccatttatgatgtccaggcagaaacacttgtttctgacacatagtaggcgctggaaaatgttagtcaaatgaacgaggtctggtgtggagagaagagaaatcttgggagagtcatttaagggggtgcccagttgtcctcataaaaaacactatcatcatcagggtgaccaaagcagacatcataggcagggggtggagtcagaggctctaatgtggggactgccgccaagctctgcagatcaggagcagtggacacagcccgtggtccccgaagccgaaggttgattggagctcttccagggyttccttcctgggccatggacccctctgaggccattygcctctgttccagtttggctctcctggacccctctggatggctaggttgttcctcctcaggtgctgggggtatcacaacagtgctgtaggggggtggttggtccaactcttgggggcggcactgggattctagtcccaccacggcctcttcatagactggcacttcaaaggcttcattgtccctgagggaagagaaataaggccattggtggcttccatgaaagaagccctttttcccttttttttgtctgctgtgggcaaaagatcctctgttggcctctgacccctcctcccgctgatgccaatgacaggaaaccagagactctctgcctcagagactacagggagagagggaggatgggcccaaggtgtattcctcttacgatgcccacccttaactcaccgtgcattgcctgagggccctgggctctcagtctgcattgattggagctgggaccgaagcccccattccagaaaccggaccaggagataggcaaacaagaagaagccacccaatgtgagaaagaaataagcaacgggggtgatgtccgtctttatgcccagcaaagccagccccagtaggaaggaggcgcagcacaggaggagaagcggcttctccagtctccccagtaagtgcattggcaccatggcccctccccaggctcctgcaaaaagacacacagctattgtgtctacactagcaattggtgtcatggctgtgtcagataccaaagtaaccatatgatatttctttgtttggtttctaggttcttcaatctcaaataaatcatctgtagagtcccctccagttccgaaattctctctatgtcttggagtgtgtggaatagccaggaaaccagcccaggagctttgactcccagccattctgtaagttgackgtgtcatggctctgccttctttcctttctccttccctgtagtctcccttccagctttgtcccttaccaccatccaggatccggtcctgggcacgccctgcctggggcttcagtgcacactggcatctctggaattcaggtgatggggcaggccctgcccttcctctgttattgctcctactggatctccacccccacctccccagccagaggccctcaatccagccccgttagagagaagaggggagggagccccacttaccctgtctgactctgtcttttcctttcctccggtgttagcccatgctccaggtggagggagaaagtgcacacaggcgcaccaaagccacagggacacaactgcttgagaaacaattgtacaggcaaaggcccagcacaatggccggaggccctgataactcctgtcctcttctagaccccacatctgccagggccctcctctaccctctgctgatcctaacttgttaaactcagtttgcaaatttcctgccaggaggtagcccagtggctgggaggcggtgggcaggggaactcttttctttccttgtaacagcaacaacccgaggcagcccataccccagaaacagcctgtcagaagttgccagcgctctgtgtagcaaggaattgcagattccctcctcacacctcggtcccaatcccatgaccctcccgaccctcgcacccacacctgtctcagaagttcgtcgctcacctgtctccacagactgtagaaagtagatggggtggggggtggtgggaagggccggagcgggtaggtggagcccactggccccaccctctttttctgtcccaatccctgttctggcccagtcagtctccgccccttttctccctaaggctgacttccaactgctgaaccttgatttgttctggtttttactctctccacccacccatgctgtaccctaatgagagtgcacccctgactcccaatgatctttgtacttaggaccggagttagcattaacctttccctctcggcgcatattgtatgttaattacagccctgggcagtttgccttctatttgggtaatttaccttgtgcgtctctcccaagtgactggaagcggagacctcggcttatttaatctctgtagatcatcacacagtgcactgcacacagaaagtaatgctgtgggcatggaatggtgtgtcctgcttccattacccaagtgctatttttatggactccctgtattctgcagacctgtcagaagtgttagtgtgtatatttcttgacccagttaactcttgagtcttcaagatcctcctccgaggtgatgctgctttggagcctgctccagtgtatccacatcgttccttcctaaatttgtcccagcatttacctggttatgtagcatttttctgcttactgattttccttccactgtgagtttctcaaggtgcgtgattagttttaatcatctctgaatcctggaaactaacatggttcctgaaacgtggtaggtcactaactagaaggctcccctctcaccaggcctcaccacacctgtgaagatcaaagagctgttctttttagttgtgggtcaggcagttaagtcggagtagggtaggtgcttggaggtagagagtgagtagaagcatacttggtccttgagccagagggtgaacaaaactgggccccgttccttcagagggtgaccagcagacagaccgagggaagctgcagaccgtgggcacaaatccaatccaggctccccagggacagctggggtggggaagcataggagagggtgtgtgtgtgtgtgtgtgtgtgagagagagagagagagagtatgggaatgagaataactgtgtctgtagtggtaataagtgtgggcactggtgggatattgaagattctctgtcccagagccccagatcgatagcagagagaggaaggagacattaacaggaaggctgtgggagtctaaatgaggtgtgtctctatgcaaagtaggcacaggagtgaggggggctgattgttgttctgtttcagccaatttcctcactgttctgctcataaggggaaagtacagctggaatcaggactgcagtctacagttaacatatgaatagaaggaaattggccaagggtcattggtgtgtgtgataggaaagggggtttgttaaggagtgagttgtgggaatgggaaggtgtaggctaagaggcacggggccaaaaggtatgggcctgaggtgtaaggggagagtctgggagaggcggacctttgtagcttaagtctcttggttgccggaaggagagtacgatagacaagaactggatcccaactggagaggctagactggtggctggctgtgcccgttcatacattctcaattccagtaatgtaaaatcaatttttaaaaattgcatttgttaaaagaaaaaacatgacaatatttaaaagctaaagaaaaaaaaattgtctatcttctcattatcctaacacggccatttaaaacgtttatatatttcttccagactgtycacatgcaaaccagaatatactaaccactttgtatctttaaaaagttttatactttatattgtatatatttcaccctgataaagaccttattgtagtaatttcaaacagccatgtaatatttcattgaatcgatatgccataatttgattaatataccctcatgatacgttgctcaataacactgagcctatttcactcaatatttttggccattaaaataatgcaggttgccgggcgcggtggctcacgcctgtaatcccagtactttgggaggccgaggcggactatcgcgaggtcaggagttcgagaccagcctggccaacatgatgaaaccccatctctactaaaaatacaaaaaggagctgggcatggaggtgtgtgcctgtaatcccagctactcgggcggctgaggcaggagaattgcttgaactgggacccgggaggcgaaggttgtggtgaaccgaggttgcgccattgcactccagcctgggcaacaagagtgaaactctgtctcaaaaaataaaataattaaaaaataataataataataatgcaggctgggcgcagtggctcatgcctgtaatcccaacactttgggaggctgaggtgggcggattgcttgagcacaggagtttgagaccagcctgggcaacatgacgaaaccatgtctctccaaaaaaaaaaaaatacaaaaattagctgggtatggtggcgcacgcctatagttccagctactcaggaggctgaagtgggaggaccgcttgagccctggaggttgaggctgcagtgagctgtgatcatgccacaaaaaaatacaaaaattagctggaggtggcggcacacgcctatagttccaggtacacaggaggctgaggtgggtggattgcttgagtcatggaggtcgaggcttcagtgagccgtgatcatgccattgcattccagcctgtctgcattccagaccctgtctcaaaaattaatataataataataataataataataataatacaagagacagaaagtagattagaatttgctaggggtggggaggcagaggaagaaatggagagtaactgcaaatgagtttcatattggggtggtgaaaatttctaaaattatataatggtgatgcttgcacaactctgaataattctttaaaaaaccccactgcattgtacactttaaaaggatgaattatacctttgtcaatcaaggaaaatgactgaggcaagtctcaattattttaggagatttgccaaagttaaggaagggcacccgggagacaagtctatgcctttttttaaagatgattttggtggcttcaatatttaatgcctttgtctggctcagtgaatctgcatttttacataagataatgtagataatagggcagaggaaacaatcagatatgcatttgtctcagtgggcagagggatgactttcatttctgtcctgtgttcccccacctgtgaagataagctatcaatttacattgccatggtgaaccttagctgaaatgctttagggtaaagatcttggttaccataaagaatttccttgtaggcaaagtgtgagggaggtgtgtagcttttcatctttgtagccatcttattcggaaaccaaaatggggctgggtgcagtggctcatgcctgtaatcccagcactttgggaggccgaggtgggcagatcaggatcacgaggtcaggagtttgagaccagcctggctaatgtgatgaaaccccatctctactaaaattataaaaattagccggtgtagtggcgcgtgcctgtaatcccagctactcgggaggctgaggcaggagaattgcttgaacccgggagacagaggttgcagtgagccgagattgtgccactgcactccagcctgggtgacagagtgagacttggtctcaaaacacaaaaacaaaaacraaaacaaaacacaacaaaaaaccaaagaaaccaaaatgggaggcaggtttgcatgacccagttcccagcttgacttttccctctggcttagtaagtttgggatcccaagatttattttcctttcacaccttaagaaaactgtttaaaaactaatgcaataaacatcttatgtatagttttccttttgttttggattatttcctcaggatgaattttaagaaatgtcattatcaagagacaagcaataggaaagtttttattgtcccgaatgcatatggccaaattgcttcccaaaggttttgctttcctttatttcttcgtcaacttaatatccttagcaaaacaggaatgcatcacttaattcaattgtcatccactttctacttgcctgcctttgacaaaccctactggagatggaatgacttctccttgcccactcttcccagctcatttgggtggttgacggtgaagggaagtggaagggcaaggagaacaagggagaagtcaagcttattgcctcccactgtgtgcttgtctctgtggctttgtatttctgtgatttttgtgtttctgaatctgggagtgctttatagtatcaacatgtgtagaatgttttgtgcatactcctcactgtgttaaatactttacacaaattaagtgatttaaaatacgtatgctatactaagaggtagttactgtgattatgtccattttatagatgaggtaagaaacttgaggtatgtgggtagctaattaagggtggggtcaggatttgaacccatggtctgaacccagaatcctggctcttaagcactacaccatcccactctaaatgctctcttgggctgctctcaaatgataatttaacaaaacactagaggcattctgaatcattattctgcccttctctggaggagtggttagatgctacttttccccactatttgccattttaagaaaaggctgattttcagacagcacgggcagccaaggagatgatcagaaggtaaattaaggttattgacatataaggcaggataaggaaatgaagattgcaagctctgtattggaaggcttaccttttatcatctgattaagacaactaaaaaatagatcagtttaaactgaataagcatacaacacactgctggtgacttctaaaaagatatcagtgacaatagatacatacctttgtgtagaatcaattgattggacccacatacacgatctcatttgatccttattaacaatcatttgggctgcctgattatcactttcattttacagaggaaacaagctcagagaaagtacacgatttctttagttagaaggaaactcagaaccttgaccttttaattcagctgggtgtgttttccccttcagaaattgccttagtcacagcttctccaaaatgtgtaaggaaggtggataaatggtttatcatgacataggtgagcaacattgatattttctagatggaaatgctttcaaaaaataataaatcctccagtatgtaaggataaatacatgcacttaccccatcaactagttttaatattgtacaaagctcgctaaacaagaactgagtgaacaatggggttgaggcagtcagtctagctcagatactcggcattaagccacaaaaaccttctggaatttgagaaattgagtgtagttgttgctaagcaacaacaacaaaaagagcattgtgtttgttagaaatgtctacagatagtgacagcagagtcccacatggatatgcctgtaaatactagcaaacaggaggccgtgcagtttaagcacatgtgttttggccaaccctggttttcaaatctcatttctaccacttactagcagtgtgaccttgggcaagttacttaacctttctgagcttcggttactaatctgtaaattggtgaaaataaacccacgtatatcacccctttcccacactgctcctccagcttggggaactacagccaaagtgagtctgggtctgactgtaatgtgcacaactgtgtgtgggaccagcgaggggtaccatcctgtcactgggacctgatttcaccatggagcatttgtttgtaactacattgtacatagccctgtgctaacttctaagggcatctatccaggagaggtaacatatttgactgtggtctccaggattttctgatatgggtagagagataagagatgcatatgaaataattaaataacaattaaagacagtatctgacagcctgggcaacatagtgagaccctgtctctacacacaaaaaaacattaaaaaattagccaggtgcagtgttgcctgcctgtaatcctagctctttgggaggctgatgggggaggattgtctgagcccaagagttcgaggttgcagaaaactacgactgtgccactacaccccagcctgggtgacaaggcaagatcctgtctttaaaaaaaagaagaagaagacagtatctgaaaaagtattaatgtatgtgccgggcatggtggctcacgcctgtaatcccagcattttgggaggccaaggcaggtggatcatgaggtcaggagttcgagaccagcctggccaacatagtgaaaccctgtctctactaaaaatacaaaaattagctgggcatggtggcacgcacctgtagtcccagctacttgggaggctgaggcaggagaatcacttgaacccgggaggcagaggttgcattgagctgagatcgtgccactgtactccagcctgggcaacagagcgagacttcgtcaaaaaacaaacaaacaaacataaaaattaaatatatggattactaaaatatagttattttagttaattaaaaaatgatctacacttttagtataaaattcaacagggaaaaaattataataaagagtaagtcttttttatatccccaaacctcagtctctcagtcccgttcccatgaggcaatctctttcccaactatttctgggtaccccctccccagagagagaccataaatatgcaaacataatatatacaggctctctttctttatacatttgggagcataccatagataatgctttatattttgctttttccacctaacaatatatgttggagattgtgccttatcaacatatgtagatcaatatgtgtagaccgttttgttatgaattactaaaagcatacagaaaaggggccaggcatggtggctcatgcctgtaatcccagcactttgggagactaaggtgggcagatcgctttgagctcaggagttcgagaccagcctgggcaacatggtggaaccccgtctctagaaaaaatacaaaaattagccaggtgttggtggctcacgcctatagtcccagctacatgggaggccaaggctggagaatcgcttgagctcaggtagcagaggttgcagtgagccaagactgggccactgcacaccagcctgagtgacagagtaagaccctgtctcaaaaaaaaaaaaaatatatatatatatgtatatatgtgtgtatatatatgtgtatatatgtatatacatataactatacgcacatatatacacatatatataagaattttacagtgaacacctgtgtactcaccacctagattttagcattaacattatactagttttctatctactcatccctttatccatccatcaatgcatcttattttttgattcattttaaagtaagttgcagacgtcaatactcttctgattttattttgcaacttattttagaagtaatgagttcaatatttgcttatagttaatttttttcccttgaagtaaaatttgcctacagtgaaaaacacagatttttaggtaggtcattccgtgagttttggtatatacatacatttgtgtaattcaaactcctatcaggatacaaaacattactatcacccagaaagttccctcatatatcttcccagtcaatcctataggcaagaatatttttttcccatctattatatatattttttgagatggagtctcactgtgtctcccaggctggagtgcagtggtgcaaccttggcccactgcaacctccacctcctgggttcaagcgattctcatgcctcggcctcccaagtagctgggattacaggtgcttgccaccacacccagctaattttctaatttttgtatttttagtagagatgagcttttgccgcgttggccaggctggtctcaaactcctgacttcatctatctgcctgccttaacctcccaaagtgctaggattacaggtgtgagccgctgcaactggcctatattttttaaagtatatatatatttatgtatctataatatgtatgatcwatatatatatatatatatatatatataatataaatatatatatatatatattttgagacagagtctcactctatcgcccaggctggagtgcagtggtgcgatctcggctcatgcaacctctgcctcctgggttcaagtgattcttctgcctcagcctcctaagtagctgggattacaggcacgtgccacaacacctggctaatttttgtagttttagtagagacggggtttcatcatgatggccaggctggtctcaaactcctgacctcaagtgatctacctgcctcaacctcccaaactgctgggattacatgcgtgagccactgcacctggcctaaagtatattgtaaagctatagctgccatagatggtgattcctctgatggatctgggcacagtaaattgaaaaccttcccaaaaggattcacttttctagatgccattaagacatttgtgccaggcatggtggctcatgcctgtagtcccagcactttcggaggccaaggtgggaggatcacttgagcccaagagttggagaccagcatgggcaacatcgtaaagctctgtctctacaagaaatacaaaaatcagctgggcatggtggtaagcacctgtagtcccagctacttgggaggctgaagtgggaaaattgcttgagcccaagaggtcgaggccacagtgagctgtgttcaggccactgcactcccacctgggtgacagagtgagaccctgtgaacaaattgccacagctatttcatccttcagcatccaccacactgatcagtcagcagccatccacactgaggcaagaccctccactagcaaagagattatgattcactgaaggctcagatgatcatcagcattttttagcaactaaatatttttaaactaagaaatgtactttttttagacatactgttgcacacttaataaacattagtattgtgtaaatataacttttatatgcaccaaaaagttgtgtgactcactttatagcgatattcaccttattgtaatggtctggaaccaaacccacaatatctctgagttgctcctttattttagaggcatttaatcagcatatattgtatgcttacagggtcagctatagccacataatttatgaaaaaccaatatgcagggctgtgtattcagaaattattaagaatttcaagacaatgacagcagaacattaaaccattttgaggccctgtgtgaatgcataggtttcaagaccatgaaaccagctttgtgtccttagaactgtggggataggatgaaacatggaatatcacagaattattatctcaatacattctctgtctctcttgttttacagcattgatgtaatacttttttaaatttaaaattttattttaaattgacaataattgtatatgtgtataggatatggtgtgatgttttatatatatatatacacacattgtggaatattacatcaagctaattaacatatctcctcatttactggtcatttttatatagtgagaacatttaacatctattcttgtagcaattttgaaatatacgatacatgattattaatcatggtcaccatactgtacaatatatattaagaattgattcctcctaatagaaactttgtactctttggtcaacatctccccattgcccaccccgcacccccagcctctggtaatcactgttctactctctacttctgttaagttcaacttttttagatttcacatgtaagtgagatcatgcggtatttgtctttccatgcctggcttattttatttcagattcctctatgtagtagcaaatgacagaatttcttcctttttaaagactaaataatattccattgtgtgtgtgtgtgtgtgtgtgtgtgtgtgtgtgtgtgtttctgtgtatacagtcatgcgccacataacaatatttccaccagactacatataggatggtggtcccttaagattataatggagctgaaaaattcgcattgcctagtgatttgtgttacaattgcctgcagtactcagtgcagtaacaggctgtacaggtttatagcccaggagcaataggcaataccacatagcctatttgtgtggtaggctataccttctaggtttgtgtatgttctgtatactccatgatgttcacacaattacaaaattaactaataatgcatctctcagaacatatccccatcattaagcaatgcatgactgtgtattatacatatcacattttttaaccattcattttgggttatttatttaaaatttaattaaaataaaatagagatggggttttgacatgttgcccaggttggtctcgaactcctgggctcaagcaatccacccacctaggcttcccaaagtgttggggttacaggcctgagccaccatgcccagcctaaccattcatttgttgatggacacttaggttgacttcatattttggctatcgtgaataagagcaagatatctctttgatacgctgatttcatttcttttggatatatactcagaagtgggattgctggatcatatggtagatccctttttagcttttagaggaacctccatactattgcccacaatggctgtactaattcctattcctgccaacccttttctccacgtcgtcactaacagttatcgttcagctttttaataatagtcattataacaagatgtgaggtgctatctcattgtaattttgatttgcatttccctgatgattagttgttgaacatttctcataaacctgttggccacttgtatgtcttcatttgagaaatgtctgttcacgtcctgtaatcatttttcagttgggtgatttgttttcttgctattgagtttcttttatattttggatattaacctcttatcagatgtatggtttaaaaatattttctcccaatccgtgggtttacattctttgttaaaaacatttttattatggaaatatctcaatacacataatatagtataaataactccccatgtatccatcactcggctttaacgataattaacatcttgtcactcttgtttcatctattccttctgacctgccacattttaaaaagcatcatgtgatttctatcctaatttttttttttttttttttttttgagacggagtcttgctctgttgccaggctggagtgcatgcaatgctgcgatcttggctcactgcaacctccgcctcccgggttcaagcgattctcctgcctcagcctcccaagtagctgggactacaggtgcgtgccaccatgcccagctaacttttgtatttttagtagaaatgaggtttcaccatgttggccaggatggtctcaatctcttgacctcgtgatctgtctacgtcggcctcccagagtgctgggattacaggtgtgagctagcgtgcctggccctatcctaaatatttcaaaatgaattacaaccaatgaaaagttttttttttttttgtgcacagccactcagctattatcacataatgaaattaacattaattctttaatatcacctttcactccgtatcattttccccattgtctcaaaaatgtattcttactctgtaaattcttttaaaatctattgttaaaaacaatatgagaaattttcaaaggagtctagttagaaagtaggcaaaagacatgaacagacattttactgacgaccatgtacagatggcaagtagcacatgaaaagatgttcattagtcattggggagatgcaaattaaaaatcacagtgagctatcactacccacctatcagaatgattaaagtaagaaacagtagtaacactaaatgctggtgaggctgtggacaaactggatcactcatgcgttgctggtggaaaagtgaaaccagctactctggaaaacagtatggcagtttcttttcttctctttttttcttttcttttcccttcctccctccctccctcccttccttccttccctccctctctctttcctttcccttccttccttcttctttccttttttttgtttgtttttgtttttttgagacagggtctggctctgttgcccaagctggagtgcagtggcgtgatcatagctgacttcaacctccgcctcacaggctcaagggatcctcccactgtagcctcccaattagctgggactgcaggcacacatcaccatgtctggctttttcttttttctttttttggagatggggtttcgccatgttgccctggctggtcttgaattcctgggctcaagtcatccttctgccttgttctcccaaagtgctgggattacagatgggagccatcatgcacccagccttgacagtttcttctaaaactaagcatggacttaccatgggacccagtggttgtgttcctaagcatttacccagagaaatgaaaataaaaacctgtacatgaacacacagagtagctttattygtaagaacctgaaactggaaacaacccaagtgtccttcaacaggcgaatgtttaaacacactatgttacatccatactatagaatattaatactattcagcaataaaaaggaataaactctcgatacatgtcaaaaccttggatagatctcaaagggattgtgctgaatgaaaacaatcaaatctgattccatttatgtagcatttttgaaatgacaagacataaagatcagattagtgactgccaagggttagggaagtacagggagggagggaggtagctgtggctataaaagggtagcatgagaaatctttacactgaaaatgttttgtatcttggctgtggtggtggtcatcagcatacatgtgataaaattatatagaactaaatacagacacacaataagcatgtgttaaactggtgaactctgaataaggttgatggattgtatcaatgtcaatttcttgatttttgtcctatagtgtgttattgtcctatagttatgcaagaggttaccactggggaaagtatgtgaagagtatatggaatctctgtattatagcttacaaaatggatatataaaaaattagagagtaggaatgggaatgagaaagggaggactcttcactttttacttgataccttgcttttactgtttttaccacatacgtgcattatttttttaaattaccatgtgtgtttggctctgcaaaaaaaaaaaatcatttctggaaacttcacctaagaaaatacatatacaataagattgttttggaaacatacagctagttgttaaccttggaatttgaattacaatgcaagaaagtagttcagtattgaatctgagtattggcacaattgcaaatttcctattacaattattgatcagaagggaagagggcaagaaactaagaaaaagtatgaaaccctccttggattagaaaaaaagagtgtttcattattaacgcacagttgctttgagaggctttcccctttcttgttttgattctatttggaagaaggagttcagaaattacaatctggatcatgagtgtaagcattagtctagaaattatctagttcctccagagaagattaaagtcagccactggattcagaaaataggatgataaagtcttcaaagaaagactgggtagagccaggaaatatgcatctacaataaaacattatcccacttaagcctgggaaaagattcaggattaatttaagtagttaatacatttagaaatcaatgggcaagatgcacagttgtactgcaatgtgaatctacaattttttttttttgagatggaatctcactctgtcgcccaggctggagtgcagtgacccgatctcggctcactgcaacctccgcctcccaggttcaagcgattctcccgcataagcctcctgagtacctgggattgcaggtgtgcaccatcacacacagcttaatttttgtatttttagtagagatggggtttcaccatgatggtcaggctggtctcaaactgctgacctcaagtgatccacctgcctcagtctcccaaagtgctgggattacaggcatgagccactgcgcccggccaaattttttatttttcatttttattattttgtgtatcagaatacattttaaaaaatcaaaaattgtaaaagtatacaaataaaatggaaagattttgatgtattttatctcagaataatgtcctctgtattatgtttttattcatcaggacatattgagatcataccatatagtttcatctttttccaatcaatattatatctcaagaatttccaatgttcttaacaattcttcagaaatacaatttttttttgagacagagtttcgctcttgttgcccaagctggagtgcaatagtgcaatctcagctcaccacaacctctgcctcccgggttcaagcgattctcctgcctcagcctcccgagtagctgggattacaggcacgtgccaccacacccggttacttttttgtatttttagtagaaacagggttttaccatgttagccagtctggtctcgaactcctgacctcaggtgatccgcctgccttggcctcccaaagtgctgggattacaggtgtgagccaccgtgctggccctcatatacaatttttgatgactgtaaaacattatctcctgaatgtgccataattgattaaagtattctcctcctgataggtgttcaagttgttcacaatttttgatatccacatatagtgctgagacaagcatctttattcataaaactggttccactcaccctgctctgggcagcttagttttgtcttaatttgcccttatggtttttaagattggacatcttcccatatttttattttatactagctgtacatcccatgaaactcctttgaagaaaaggagtacttaatttggagatgttcttttgccattacttcacagataagttgggtaaagatgattttaaatcctggaggatgctakagacatggaaaaggtgagagaggaagacagaaattaatgggagataaaaggggaaaatggactatgggaagagccagacccagagggagggatggaagggaaagtggcattgctcctgaaactcctccgggctatgtaaggctccgtacttggttcccaacaatggatccaagtgaggtttcagcttccaaatacagagtattcttaaagaagtcaaaatactattgaaacaagggattctgatcattgcacaatgggcacagctagaggcagggactttgggtcaattactgggggaatggaaaagttatatgtatgtagtagggaacaggggttatactaggttaggcagagaagccttggagttttctcagaatctgcactgagggttaagggaggtatctatgaaagggtgtgcaacttccccaaaccgcagcaactccagccagtttcccggtactgccttgccctggttttgcaggtgtggctggacccagtttaaatatctggccacaagctcagccagactctggttccctcggctgttcactcccactgggcttctggtcccagccccatctcagtcactgtggttggtcagaagacagtaaatcccaaacttgattagttgcaaagtccatctggcttggttttctgttgctgatagagagaccaggggagtttctgtgtgagagaacgggggactattctcacttcttccaccgcacaagctgctcaaggtgggctgcatggctggtctggctggaaatactgaaacagctctccttcacctacccctagagtaggcaggatgtgaccccaggaatgagaatataccagggcagatacagacacagaaatgttttgcctgatggcattaggtttattttgtgggaaagcagaattggggctctctgaaaggcacttgtgaggcatagaagtaaaggttgccacatggctaatggtggacgtcttcctggcatccttgggggtaggggaaagacagacagctcccagggccacagaaaatacctctatcagatagagaaatccgagtcccagtgccttatggtggagccaagggttaagcagatggcctgctttttttatamsaagagtttgcttcctccgggcaatcttaaagtctggcattcacggctggaggtatagggcccatccacttctctcctggatgaagaaaacaacagactctgcacactgttctcaggtgttctggcagcaggagttggtcccacaaggtcccaggggttttctagaaagacttttgcttggcttcaaggtatagaaggcttccttttcttttatggggwtgaagacagcccctgcccactcaaccttgaacagcactgactgcataacgctttgttactggaagtgccaagaatatttttttgctctgagccccwccttctggtcaactgatatagtgggtgtggagctggggtcaaaggcagctcagggttgaatctttttattttttgagacggagtcttgctttgtcacccaggctggagtgcagtggcgcgatctcggctcactgcaacctccgcctcccaggttcaagtgattctcctgcctcagcctcccactgaggcagctgtagtcccagctaatttttatatttttagtagagacggggtttcaccatgttggccaggatggtcttaatctcctgaactcgtgctctgctcgcctcagcctaccaaagtgctgggattacaggcgtgagccactgcacctggctcagggttgattctttaacttacttacccagcaggtgcgccagcagctccatccggtcagagccaaataacatgtgggtttggccatccacatgggccacggtgatgggcagcccaaaggcctggagaaagcagttacaatgcaaggaggaaggcaaaggagcaggtattaggcaggggttgaaacctttgagtcagtacttttctgagttcacagaagcaaagaggtctaagaggctctgtggccccaggtgccttcctgtttctaagatgctctcttttctctcactgtgcatctccttcccttcctttccctgagcccaaggaaaagaaggaagaagatgagggttgtttaagagcactgaggagaacacttggaaagggggcttttgtacaggagcataaggactcaaacttagagattctcaagtctccatcttcaggatgggtgctgggaacacacataaagagctgctcactccgtatctgcaggctgcctcagtggtctccttgagctggttcttcacctttggcgttgcgatcttttccagaagtccctgggcttgttctgcagacataccagccttctctgcagcctaagggaatatagtagggaatacaactgtgtctgcatgatattggatggggatctcagaggaaaactctggtctttttattttctgcccccaagttttgctggcaatgcccttacccacccacaagtggagatctgtccttgccaagaggaactatttcctttatcccaaatcttgagatgggtggaaaaggagaaaaggtagatggcacagagtcaatcacagaaattaacaccagcggacatcttagagagcagctagatagacctctttatttcacaaatgaagagcctgaatccagaggtgatacattacttgctcagagttacagagcatgttggtagcagagccaacactagaatccaggtctctagaattcaagtccagggctctttccttcctacctctcacagttcctaagtatctcatgctttttttgaatcaagagctaggctgtaattccagtggaacttcctgagaactttgtaacaaggcacatggctgcagccacctacctggcttcaagacaaagataaaggcttcagtttgtggtttgttggtatagtttgggatagatggttcttaactttggctgcccatctgaaactcctgaggagctttaaaaaatctccacgtgaggtcatcccttagaactagatccaagcactgtggctcatgcctgtaattctagcactttgggagactgaggcaggagattgcttcagcccaggagttcgagaccagcctgggcagcaaagtgaaacccccatctctacaaaaaatttttaaaaaattaggcatggtggcacatgcttgaagtcccagctactcgtaaggctgagatgcgagatcacttgagcccaagaggttgagtctgcagtgagccatgatcatgccactgcaccccagcctgggtgacaaagcaagacactgtctcaaaaaaaaaaaaaaaaaaaaaaaaaagaaagagaaaaaaaagaacaagaacaattacatcacaattccaggggaaagggttagcgccaaggtgctccaggtgattttaattcacagccaagattgacaaccactgcaacttgacttcctagatcagaagtgggacccaggaattcatgtagcctgtcctaatgagacactatctttgacttggttaaattagagaattatgtcctacacaaaatgtttaaccacagaaaaatggttaagcaaaacaaaaataagtccactcagtggaacctctatagaaacaaagaactatactttcagagttaagaattccatggaggctgggcacagtggctcattcctgtaaacacagcactttgggaggtggaggcagacagatctcttgagcacaggagtttgagaccagcctgggcaacacagtgaaaccccttctctacaaaaaataaaaaagttagccagacatggtagtgtgtgcctgtagtcccagctactcaggagactgaggtgggaagattgcttgagtccaggaggcaaagggtacagtgggtcgaggtcacaccactgcactccagcctgggcgacagagccagaccgtgtctcaaaaaaaaaaaaaaaaaaaaaaaaagcatggaaaatgattaaatatgaagtaaaaaagcaagctaaaaattacacatgtactttgcaggagtatagactgtagaagatatatttgccattccttatacgtttaacttttgtgtgatttgccactttatatattaaatttgaataggtctcaactatttttttttgtaaaccagaggaataatactgttttgaatttcctaatttaatcctgaagacaaacttacttttatacccccatccatggctcactggtcaatgttttgagctatttccatttgttctcactcaggctcctatataaccctggcattagttatctcttttcgtctttttaaagcctcttggaacaagtctcctgccttccactctggatgtgttggtgaggtttgtgttggagtttgtggagacttgtgaatactatatccctccccatccaggggttccaacactgagcatctttctctcactgacatctttcagcaaataaattcttcccatatattgtcccttttgcacttcccctttcaaccttgagatatccttttgaggatccttagttccaacttttcagtagtttgtgccctgaatcacagacatcctttcttccccagtaattataaccttttccatgcaataagagacctattgtcttctttacccccaaacgccaactgttctcagattctctatgagtgcagttggggtggagccaggacactcaccgccaggatgctctgcggctcggtgatgtcttcattctgggaagaagagaagacagcaggaaggcggtgcggggagaggggtgtgactgggaggacagtagatcccccgggcgggggcaggatcatgaccctgaaaacgtgcctggggaaggtcagaaagtcatccaaggtcctcccagaggattcccagagccccacactcacccttgaccagacgcgcatccacagctcccgggacgctttctccagcatctctggatgctccaagttcacggcggtgaggaaacgcatggcagacaaacttcctgtggggcagaggcacccagaggcagggctcctcttgctgctttcctggtggaggactagctcttccttgcttctgacatcccccagagctcctccgccctcagcctctcacccaaggttcccatgacctatttgcctgctcttcttccctttcatgcccggcaaccttcagctcgctcaaggctgatcctgaggtttcccaaggcaggcttcacttgctttagtctcccgcagcccctccatcctatcaatccctcaatctccgacttctgtgtttttcactggataccctgtctacatcccactctcttcacctttttcaagcatcacagacaagaaatccttggggaagtggatgggaatctggagatggtgtctcaggagctttaagtcatttgccatgtatagtcctttgcggggaagcagacctggaggcttgtttcctgccaggagaaggttgggcacrctaagtgagaaaagacctaagggtcccaggtttggggacctcgacgtgggttttgggcagagggcagcttccttttttttctcttgttgtttcgctcttgttgcccaggctggagtgcaatggtgcgatctcagctcaccgcaacctccgcctcctgggttcaagcgattctcccgcctcagcctcccgagtagctgtggtatacaggcatgcactaccacgcccggctaattttgtatttttagtagagacggggcagagggcagctttctggctgccagtgccaatataaggacccgctggggtcggctctcttgggccactgagatcacccctgccccgaccctcccttcctaccactgtctttcatgatccctgttatgaggctgggccgcaactgcaggttgatgttccagatattctgataccggcacaggatctgcgggcagaggtcaagaacgattgccagtgtgcaagatggaaaagtgaaagagccgagggaaagggaagggaggcgctaagtgcagagcaggggttatgcggacaccctacattgtttggtttgaaattggcaaaactctcctcactactagaaatctattccaggatcttcgctcctgtggccagttttccccaaaactgccatcgttgggctaagaggtggccgtgttctgcatttctccctgaatgtttggagccgcccctctttccaccaccgtgggaaactgcagtcgggatataaaggctcgggttggagccagcgactctattccgtttaaaagcacaaagtgaccttcagccccggagctctccctgcttgccttaaccccttgggcggcgccaggagttacacgagacctctgtcccggagccctgcgctcactcttccctccgccctcactccccagacactgccgaggcgacccctcccagcgtcacctcgaagcccagccaggagtagggggacagcacgtcatagaagagctccacggtgcgcggcaggggccccatgctgcaggctccggaagagcagtggcagcaggagctccttttcccggaacccggcagaggctgcccagcttctgggcctgcctgggaccgcccaccgccttagcgcgcagcctcagagagaaactgccctggtagaggtccacctccggcgcagcggggcagggccagcctacggcccccagccaggggcggggtgggtagggaccccttggggagcgcgcaggtgtggacaaggggcgctgcaatcgcctttgcaaaaattttaacagtgagaaaattacgaaggtgaaacagatctgaactcaccaactccatcgtgcctttaacctccaaactgcccttggtcattcctgagcatgggacgagctaatatagggagaaatttagtttatagtttaaatgataatagcccttccccaaactaaaccagttttataaaactaataaaagtccacaagtttaggattatgagaggggcctgaattctgctaagatgtaggcattaacaattaccagacattgttccagaggtcacaagctctgcaacttccccaattattcctgtaaataaccacttttgtagaacctaagactggcctttgaagataccttctcagacttttccatttctaatgacaggatgactccacctggaccagtgactcctctgtggcccgcatccaaatgcaactcggtgcactgaggacggttttccacacccctgtgattgcatccccaaccaattagcagcacccattctctagccccttgcccatcaaactatcattaaaaaactctagccggcgggcatggtggctcacgcctgtaatcccagcactttgggaggctgaggtgggtggatcacttgaggtcaggagttcaagaccactctggcccacatggtgaaaccctgtctctactaaaaatgcaaaaattagccgggcatggtggcatgtgcctgtaatcccagttactcggggggctgagtcaggagaattgcttgaatccgggaggcagaggttgcagtgagccgagatcatgccactgcactccagcctgggtgacatagcaagactccctctcaaaagaaaaacaaaaacaaaaacaaaaaaacccacaaagtcccctagcctctgcctccgaattttgggaggctaatttgagtaataataaaactctggtctcctgtttagctggctctatgtgtattaaactctttctctattgcaattcccttgtcttgataaattagccccatctgggtaatgggcaagatgaacccattgggctggtgtcagggtgactgtmctgctctgcagtggagtcttgtgggaagggggtagtttgagatgcctgcagtgcctttcacttagctgtgccccttgggtgagccacttgacctctctgaacctatttcctcatcctgcatacacatggggaatatctaatgataacacctgccttatgacgagttgtgaggaatgaggtactccaataactgctagctcttattattgttgcttggcagttgcatgaatctcctaaactggggcagaataagaagttctcagagtacacattttcttgtgttacctttgtcagagatttgcacaatgtctgggacacatttgaccatcgatacatatattttgagtgagtgaaaaaaaagagggactggtagaagatggagaggcctcactatagataattttggtgataatggaaacgattggccctattcgttttcacaaatatgtgagtcatattgtcttatattgggattacatttactgcaaagaaacagaattttaaaataattccatttaactttgttaaaattatttttaacattactaatttaataaattggaaaacatataaagattccacttttcatttgtatcaataaggaaaacaactccaggctatcagaatacagagatacgaggtaaacccctacatggagaagagcatgcaaaatggaatgaaaaatgatgttatcattacctacttgcagagtaaactaattgttcaacaaccactgaaactaaactttttttttttttgagatggagtcttgttctgttgcccaggctggagtgcagtagcacaattgcagctcactgcaacctctgcctcctgggttcaagcaattctctctgcctcagcctcccaagtagctgggattacaggtgcccaccaccacgcccagctaattttttgtgtgtttttggtagagatgggctttcactatgttggccagcctggtcttgaactcctgacctcaggtgatccacccattttggccttccaaagtgctgggattacaaatgtgagccaccacagcccaccttgttttttttgagacatgatctcactctcgctcagactgaagtgcagtggttcaattttggctcactgcaacctctgccccccaagctcaagcaattctcccaccttggcctcctgagtagcagggactacaggtgtatgtcaccacacccagctaatttttgttttttgtcgaggtggggtttcaccatgcttcccagtctggtcttgaattcctgggctcaagtgatcctcccacctcggcctcccaaactgctgggattacaggcatgagccaccatgcccagctacatttttgtttttctccagtaatcataattttaaagtgtccaagagctaattcagcgtggtaatttaaggtttcatttcaaaggtagatcaatcacttattttaaaaagctttttatatttggaaatgttttagatttatagaagacttgtaaagatagtacaaggtttctgaatacccctcatccagctttacctaatgtgaaaatcttacataagtatgataatgataaaaaccaatacattaacattggtacattacttttttttttttttttgagctggagtctcactctgttacccaggccggagtgcagtggcgcaatcttggctcactgcgacctccggctcccaggttcaagcgattcttctgcctcagtctcccaagtagctgggactacaggcgtgtgccaccacgctcagctaattttttgtattttttagtagagacggggtttcaccatattggacaggctggtttccaactcctgatctcgtgatccccctgcctcagcctcccaaagtgctggcatgagccactgtgcccagcctggtacgttactattaactgaactgcaggttttgctcagatttcaccagttttttcattagtgttctttttctgttccaggatccagtccagcatacatacagaattttgttgtcatgtctctttattcttcccatatctatgagagtttcttggccttttctagtgtttcatgactttgacacttgtgaagagtattgatcagctattttgtggcatgtcccttcatttgggtttgtctgatatttcctcagagtaagactaaggttgtggacttttgggaagattaccacagaggtaaggtgcccttcttgaatcatgtcatgaggtacagggatatcaacatgactcatcactggtggtgtttaccttggtcacctggttaaggcggagcaactggaaaatttctgcactgtaaagtcaccatttttccctatccaaaccctagtttttggaagggagtcagtaagtgcagcccatcctgggagtgagggttgagtagattaagtccatccactggagggaagaatattaaagaagttgtggatatacgttaacactaccatggtaactaataaatatttgggggagatactttgaggctatgcaaatatccagttgctccctaaactgtcacccatcagttttattattcatcagtggatcttgcctgcagcagttgttactgtggtgttctaatggtgattctctatttccttagtttttttcatttattaattggaattcttttgacaggagagttgtcccttctttctatttatttatttattcagtcagttatttatatcagtatggactcatgtatatttactttaagaatcacagaataataaaacattgatctgagtccttacagtctatctccacatactattactgttgttattattattatttttaggttgggccctgttgtggataaaatggagtagagacaacaaaaagaaaaatatattcacttctatgggctatcatcttcctattgctgagaggggtatttagtgttaaaagaaaaacctcagacaatttaaatttaatggagtttatttgagtaaagaatgattcttgaatcaggcagtactcagaaccagaagaggttccgagagctctgcaactgtaagcaatgagtatttataagcagaacaggaaggtaaagtacataaatagtttgatttgttgcagctaagtgttttgcttgatttagacatgagccagtccgttggctgcttgcacttagctgaagcttggctgcttgtgattggcaaagacctggttatctgttataaaaatgaaactcctaagttaagtttcagtttgtttacatactaagttaggttgcattttgtttcataggaattcaaagcatggagactgtctcaggtcaatagcctcctgcttacttaattttactctagatactgattagagctattgaaacaagaaatagtggtataagtaagttatttgaagtgggaaaagcactaagtagaggaacaaaacatgatataattatcaaacattggaggaggcagaggagaggtggtgtatgcgatccaaattctcatctttcgtagatgagccaatggtattatctacatttgaaagctcagtaaatagcgctttaatcatgtcatttggaattaaataattgatactggaaatgctttaagttgccttttcaaataaataaaaaattgactattcaataaatgatattgggacaactgagaggtttttttttttgtttttgtttgtttgtttgtttttgtttttttgtgaggagtctcgctctgtcacccagtctggagtgcagtggcacgatctcggctcactgcaacctccacctcctgggttcaagcgatgctcctgccttagcctcctgagtagctgggattacaggcgtgtgccaccatgcccagctaatttttgtattttttagtaaagacagggtttcaccatggtagtcaggttggtctcgaactcctgacctcttgctccgcctgccttggacccccaaaatgctgggattacaggtgtgagccactgcgcctggcccaaaaatgtatttagatccatacctcacaacttacacatggaacacctctaaatggatcaaatatctaaatgttataaagaggaagccaataaagtgcctcaagaacttatggagaaacttttaaaacagctgagaatagaaatagccttgctaactgtaataccaatgcagaaaccttaaaagatcgatgcatttaattatatcaaatttttaaaaatctgcttggcaaaatccaatgagtcaaaaacataactgggaaaaatatctgtgcttatttcatagtcaaaaagctaattttaattattctactgtagaaagagctaaaaatcaatacattaaaaaaaacagaagcccagtggaaaaaatgggaagatgaagagaacatacatgaaaatggacatatagatggcttgcaaatactaaacatttgaagacaytttgtatacttatgataattgtcagttaaaactaccctgtgatatgcttttgtctatcgagttgacaaaactcataaagtttgatgactcagtgttggtacggagtcatggaaaaccattcttttatttaaccggtgggagtgtaaattggtacagcgtctgcagagggcagtttaatgatgtcttctgttttacagatgtaccctttgatccagcagttttaagaatttagatataaacatggttgccacctgcgacatgatatactgtgaagttatgaattattatttttaattgacaaattataattatgtaaatttatggggtacaaggtgatgttttgatgtaggtataaatgtataagtcaagctaattaacatatccaccacctcacttattattttttgtgatgagacatttgaaaattactctgagcaattttgaaatatacattattattaactatagtcaccatgctgagcaatagatatcaaaaacatatcccttttttttttctaatagaaaccttgtactctttctacagtatcttctcatttcccctcctgcagtgagttctattttatgttgccttggcatcgattttgaatacaagtttaactttctcacaacagaagcagaactcagtcacccttgacagggtttctagttctacgtcacatccaaatggctcaagccggtggccagagataagaattcagagacatctctccggcctagaagactgggctctctcctttcccactgcttccttttaaatgggccattcaggtattttccagagaatttaaagtacccccaatcctagtcctcatatatacagctagttgccatgggcttctctctctctgcctaactcttccttcctgcctgtcatgacccagggatggaggattgccctcttcattcattacatctccttgcccaatatctgtaagcaaaaattgctgaacttgtctcctattttggtggtgcattgaatttgtgcctcccctctgaaggactaggagatgccccaagctgggttttccctgagatgctgaggagaacacaaggtcaggcacccagcaccagagtgatagccaggcaggcataaactgggcatgggtcagacaagggtcacaagagtgtctgtcagtataaaagagtgttctgtgtgacggatcccctgaatccaggctgaaaactaggcattagtccaccccctggttaaaaaaagtatcctgtgaaaggacatggtaaacatccctatccagttcccctttatttcctgttaggggcagtgttgctagccactctggtattggaaccccagtttggctggggctctcaaaacacctccatgctgttttctataayagctgtactaattgacattcccaccaatagtgtacaagggtcccctcttctccacatccgcgccaacacttgtttttcatctttttgataatagctattctaacaatgtgaggtactgtctcattgtggttttaatttgcatttctctaataatcaatgatgttgagcatttatttatttatttttattgttatttttatttctttgagacagagtcttgctctttcgccaggctggagtgcagtggtgcgatctcagctcactgcaacctccgcctcctggattcaagcaattctcctgcctcagcctcctgagtagctgggactgcaggcacatgccaccatgcccagctaattttcatatttttagtagagatggggtttcaccatcctggccaggatggcctctatctcttgatcccgtgatccgcccgcctcggcctcccaaagtgctgggattacaggtgtgagccaccacacccgaccatatttattttatacatatctgttggccatttgtgtgtcttcttttgagaaatatctactcaggttctttgcccagttttaaatcatgttatttgttttcctgcttttgagttgtgtgagttccttatatagcctgaatattaaccccttatcagatgtgtggtttgcaagtatttcctcccacgctgtgagttgtctcttctctctgttaattgttttctttgctgttcgaaagctatttagtttgatgcaatcccatttatctatttttgcttgtgttgcctgtgcttttggggtcatatccaaaaaatcattgcccagactgatgttgtggaggttttttctctatgttttcttctagtagttttacagtttcaggccctatatttaagtctttaatatattttgtattgatttttgtatatggtgtaagataataatccaattttatttttctgcttgtgaatatccagtgttccaacaccatcttttgaagagcttatcttttctcccttgtttgttctaggcaccttaagcaaaaaggaagttagccacacatggtggctcatgactgtagtctcagctacatgggaggcaaggcgagaggatctcttgagcccaggagttcgaggccagcctaggcaatgtagtaagaccctgttcttaaatttttttaaaaagcaattgtctataaatgtgtgtgtttatttctgagctctgaatcttgctgtgttggtccatgtgtctgtttttatattatgctcttttgattactatagctttctagtatattttgatgtcaagaagtgtgatacctccagttttgttctttttgctcaagattgttttactatctgggtatgttttaatggttccatacaaatttagggatttttttttctatttctgtgaaaaatgacactggaattttgatagagattgcattgaatttgtaaatcgctttaggtagtatggacattttaacgacattaattctttcatgggacaactttccatttatttgtgtcattttcaatttcttttattagtgttttacagttttcagtacacagatgttttacctcatttaaccaatttttaaaaatttacacctaagttttttttgtttgtttttgttgttgctactataaatgggattgttttcttaatttctttttcagatggttcactgttggtgtacaagaatgctagtgattttcgtatattaattttgtatcctgcaactttattgatattgcttatcagttctaacaatttttttggtggaatctctatagagttttctatatataagattatatcatccacagagacaattttacttctccctttcatgttaggatcccctttatttctgtctcttggctaattgctctggctaggacttccagtactatgttgaaaaaaagtggtgagagtgggcattatggtcttattcctgatgtcagaggaaaagctttcaacttttcaccttgagtatgatgttagctgtgagcttgtcatatatggcctttattgtgttgtggtatattccttccatacctgttgagagtttttatcgtgaagaatattgaattttgtcaaatgatttctacttctattgagatgatcatatggtttttgtccttcattttgttaatgtggtgtattatgtttactgatttgcatatgttgaaccatccttgcatccctgggataaatcacacttgcttacggtaaatgatctttttagtgtgctgttgaattaagtttatagttttttgttgagggtttttacacctatgtttatcagggatattggcctacaattttcttttcttgtactgtccttgtctggctttagtatgagggtaatgctggcttgtaaaatgggtatggaagtgttccctttacttcaattttttttggaagagtttaaaaagaattgttatttgatatggtttggatgtttgtctcctccaaaatctcaccttaaaatgtgatccctggtgttggaggtggtgcccagtgggagatgttggttcatgaaggcagatgtctcatgaatagggtggcttagtgctatctccttggtgatgagtgaattcttgctgtgtgagtccacacaagagcagattgtttaaaaggacctggcatcttgcttgctccctctctcgccatgtgacgtgctgactcccctttgccttctaccatgattgtaagcttcctgagaccctaccagaaacagatgctgacattgtgctttctgtacagactgtagaactgtgagccaaataaaccacttttcttcataaattacccagtcttaggtattccttaatagcaacatgaatggactaatacagtattagttttttatatgtttgctagaattcagctgtgaagccatctggtcctgggctttttttgatgaaagactttctattaccaactcaaacatcttactcgttcttagtatactgagattttctatttattcatgattcagtcttagtaggttgcatatgtctagaattaatccatttttttctgttatcctatttgttagaatataattgttcttagtagtttcttatgatcctttgtattctgtactatttgttatgtttcctctttcatttctgattttatttgagtagtctcttttttccctagtctggctaaggtttttttcacttttgtttatattttcaaaaagacccaactgttttgtttattttattttatcttaacttattttattttttagagacagggtcttgctctgtcactcaggctggagtgcaatggtacaatcttagataactgcagtctcgacctcctgggcccaagtgatcctcccgcctcagcctcccaagttgttagggctgtaggcacttatggccatgcctggctaatttttgtatttttttttttttttttttggtagagttggagttttgccatgttgcccaggttggtctcagactcctgcactcaggcaatcttcctgcctcggcctcccaaagtgctggggttacaggtgtgagccaccatgcctggccaattttgttgattttatctattgtttttctaattactattttatttatttccactctgctgtttgttatttccttttttctgcttactttgggcttagtttgttccttttctagtttgttaggtataatattagatcgctcatttgagctctttcttcctttttgatataggtgtttattgctataaagtttcctcttagaactgcttttgccacatcccatgagttttgatatgttgtgcttcaattttatttgtctcagaatatttttcaatttccttttgatttcttctttgatctaatgattgttcagagtgtgctctttagttttcatatatgtgtgaatttttgaagatttctcctgttactgatttctagtatcatactactgtaatcataaaatatacttgttatgattttaatcctcttgaatttgttaagcctcattttgtggctatataagtcagttctcacactgctataaagaaatacctaagactgggtaatttataaagaaaagaggtttaattggctcccagttccacaggctgtataggaagcatggcaggaaacttaaaatcatggcagaaggtgaaggggaagcaggcacatcttatgtggctagagcaggaggaagagagaagggggaggtactaaacacttctaaacaaccagatctcatgataactcactaccacaagaacagctccagggggaaatccaccaccgtgatccaatcacctcccaccagaccccacctccgacactggggattattacaatttgacatgagatttgggcagggacacagacccaaaccatatcagtggcctaacatttagagccatcttagataatgttctgtgtgcacttgagaagaatgtatattttgttgctgttggatgaaatgttttgtatatgtgcattagttccatttagcctaacttgtaattcaaagccaatgttatcttactgattttctgtctagatgatctgtccattgttcaaaatggagtgttgaagtttcctactattattatattgcagtctatctttcccttcagattatttatttatttatttgagatagcgtcttgttttgtcacccaggctggagtgcaatggtgtgatcttggctcactgcagcctcgaccttctgggctcaaatgatcttcccacctcctgagtagctgggcctacagatgtgcactgccatgcctggctaattttgtttatgttttgtagagatgaggtctcactatgttgtccaggctagtttcaaactcctgggctcaaggaatcctcctgcctcagcctcccaaagtgttggaattatagacgtgagccaccacacccagcctgcattcagatcatttaatagttgctttttatatttagatgttctaatgttgggagcatatgtatttacacttgttttgtcctcttcatgaattgaaccccctattattgtataatgaccttctttgtctttttttttttttttttttttttacagtttttgacttagtctattaggtctgctatcagtatagctactactgctctcttttggcttccatttgcatggaatatcttttttcatccctttgctttcagtctttgtgtgtttttactaataatgtgagcctcttgtaggctacatttttttttaaatccactcagttactttcttttgattggataatttaattcatttttatttaaggtaattatttaataggtgtggacttcctactgctatgttgtaacttgttttcttttgtcatttttcttttttcatgccttgctatttttttttgtggtttggtggtttcctgtagtgatatgcttcaaattatttctttttatgttttgtgcaactactataggtttttgtttttgctttgtagttaccatgaggcttacatgaaacatcttatacttataataggctattttaaacagataacaacttaactctattcacatacaaaaattctacacttttaccccaaccacctcttataatattgatataaaattttacgtctttctgtaatttgtatcccttaacgatttattgcagctatagttgtttttaatacttttatcttttaaccctcatagtagagataaaattgctttatacaccaccattagagtagtagattatcctgaatatgcccattgagttttatattttcatatgctttgttattaattaaataccttttatttcagcttaaagaactcttttttagcaattcctgcatgattactaggcaggactagtaatgatgaacacccttaaattttgtttgtctggtgaagtttttattcttccttatttcagagggacttcttctggatatattcttgtttggcactgttttccttcagcactttgagtatattatcccactctgtccttatctgcagggtttttgctgagacatccactgctagtcacattgagattccttaagatgtgatatttccttatctctttctgctttcagagttctttctgtctttaattttgacagtttgattatgatatgtcttgttgaacacctctttgagttgaattttgttggagacctctgagctccctgtacctgggtattgacatctttccctagatttgggaagttttcaaccattttttaaaaagtgctttctggcactttctctctttctccactttctgccacttctatttttacttatttatttatttgaggcaagatctctctctgttatccaggctggagtgcagtgacatgatcgtagctcaccataacctcgaacaccttggctcaagctcagcttctggaatagctgggactacagatgtgtgccaccatgcctggctaattttatttttgtagagatggagatcttgctgtgttgcccaggctggttttgaactccttgcctcaagcgatcctcccagtgccacttttattatgtaaatttagttatcttgatgatatcctataattcccataggctttctgtcttcattttattctcttttctttcttccctgagtaatttcaaatgtaccatcttcaacctcactgattccttcttctgcttgattgagtctgccattgaagagttttattgaatttttcagctcatttattatattctttttctctaaaatttctatttttattgtttttatttctttgccaaactttttgttttgtttgtgcattgtattttaaattttatttaattttctattcatgttttcttgtagttccctgagcttcttgaagaggatttttttctgaagtttttatcagtcatctagggtctgtttcctaaatgagtggtactgctatttgaaattttatagttcttcatttttttagggtccattattggagcattattaatttctttggtggtgtcatatttctctgtttttttgtaattctgtgtctttgtgtcagtgtctgcacatttgaggaatcacctaccttgtctggtttttgctggtgttctgcactggggatggagcttcgctatttagcctggcctgtgtttctgaacgggtcagctggtagtgaccctatgcaggcagaccttgctcttgggttctttagttgggctgagctgctgcctaagctcaaaggtcagctggagctgctggctgtactctgtactctagtaagagcactggctgggctttgtgtttaggtagaacttgtggctaggctctgcaatcatgtctgattgagcagatttgcaggctctttttcataggttagtggtatgctgtttggaatctggctggacagggctacaggctgggccttagccttagggctggatgagtctctgaggtcactgcttgcccacttgggatgggcaaagccagaggctatgctctacagatatgcacagtttcaagctttcctccctccccaggcctggaagaacctcaggttgggctgtgaagcagggaagggtcattgcttgaccacaagagttgggtgcagccaaatgctctgctctgcaaatatgtgggggcatgaacttcccttcctatgaagttataaattacaacactttttgtaatagcaacagattggaaagcacctaatgttcattgttatgggagtaattcaatacatcaatatttagaatatcttgcatctttaaaaagaatttggaagctcttttctattactatttaatgatattccatatattaataagtgaaaaaagcaagatgtaaaatgatgcatattattatcttaaaagttggaaatattctgtaaatgtgtgaaatacacatgcatgtatatacttcctgatattgcttaatggagtgacaaagaactgacaaaattgttgcttttgaggaggaaacataggtaagtgagtaccagggtatgagggagagtttttgttgtatatgacatttaaaactcattaaatttttgacccatgtaagtaaattatctacccagaaagaagcacagatacgaaggaaagaaggagggaggaatgggtgtagggaaagatgaagggaggaaggagggaaaaaaagcaatgaagaaaggaagaaagttgcccttaggaaattatactggcagaagtgggagggaattagaaggaggctgttattatttatgtgattttcttttaccatttgtatattttacctggatttaaggaaaatgtcaattatgaaggccatatggcaacatctgtgacagagtgttaagatacaatatttgccaagataccactgagtactgagtatttatattactggttctcagcacttgacattttcctaaggatttatcaatggttatatgaaactctgtgtgctagctttctcacttaggaaaacataccaaatgtaagagagtgaaattgacattattataattctaatcttgggtgtgctatgctatattaaaagagataaaccttagcaaactggggtactttaaatatgattaataagtttaggtagaacatctcatgattcatcgggacatatcagtgtgacaatattgaagctgagaacaactaatatatactgtaattatatccttataaaatatgtattcagatggacaaaaacaaaagaaaatgaaaaaataaaaatagctgcattacatatcgtgtaatttctcctaatttctcagactctaatgtcttttccttccttccttccttccttcctccctccctcttcctccctccctctccctccctccttcctccttcttcttttctctctctttctttttctttctttctttctttctttctttttctttctttctttctttttctttctttccttccttctttccttccttctttctttcttcagctttattgaagtttaactgacacataataaactgcacatatttaaagtatatgccttggtaagttttgacatgtgtatatccctgttaacttgccatcacaatcaagataatgaacatttatgtcaccctccttccaaattttcttacgaccctttgcaatcccttcctccatttctccctgccctccatccccactgatctggtgtctgtcatgatagattatcttataaatatatatttttgtacattaaaagtttttgtgctccaatataaacttgagaagccagagtcattgtttcacattgtcacatttgggaggcagcctcctgaagattacagtggaggagctttatcagggattgattttatgatcaacacctgtggagaggaagtgatgggatgggaagagaagggaagaaaatgagagagtcaggcagagggaaaggttggctgtggtgctgtgatgctgtctcagcaaaggaccctgtcagttctacaaggaattctgagattgtactgagttccggtgagttggctgggactttacatccccttatgagctagtctcaggttatgcgctgccctgggaaggggccctgaccttggctgaggtgactcttcagctcagggctgacagctgaaggctgctggcagcacctcacctgcttgggtttatgtctaagggagcctgtgcagaacatcggtgtccccagtgcaataatcctggtatttctccyattctgagccgttctttgaaaacacagttgttagagaaacaaagttgaaatgtgggaagggaagggatatggaaatattttcagagactcttctttttttaaaagaatttgaaaggatagtgagaacaatccttaaattcatgtcagaaaagaggattcatttgttcattaattcacacgtttattcatttcactagtgcaggatttcttaacctcagcatattgacacattggaatggataattattggttgtgggggctgttgtgtttattgtaaaaatgtttttgtaacatttctggcctctacccactggatgccactaggtgcccaggtgtgaccaccaaatattatgctaaatgaaagaagatggatgcaaagtactatgtgttatacaatttcatttgcataacattttcagaatagacaggaagcaaatcagtggtttctcctaaggctggcagtgagagtggggattgactgaacattggcatgagggaacttttaaggtgacaaaattgccaagtgtttcctggtggcatcaaaatcaccctggttgcaaacctgcactggtgtctattgagtgtctcctctgcctcatgcactgttctgagtgcttggggttataagcactccatctgatgtgggagtcaaaaggcaaaacatcaattggcaaattcaatacaaagtgtgttttgtgtgtgcgtgtgtgtgtgtgtgttgagggaaggagtgttaaggatgttgagaaagaatcagggaatgcttctcagaggaagtaaccctaaatgaagacttgaactgtaggtaggaagtaagtagaccgtggatagcactgtagtcagggttgcaattatagaatacaatagactgcatagcttataaacagcagacatttatttctggtaggtctggaggctgggaagtccaagatcaaggagctggcagatatggtgtctgatgagggctcactttctggctcacaaatggccatctcctccctgtgtcctcatgtggtagaaaggacagggaactctctgggtccctttcataaggccacccacccgatttatgagggctccaccctcatgacctaatcattttccaaagcccccacttcctaataccatcaccttgggggttaggattctaacctatgagttttgtggggacacacacattcagccaatagcagagaggaagagcagatagatattccatacagagccagcaacattatggaaaagcccattgtctggagtcttgaggaactgagagaaattctctttagctgaaggatttgaaggagggcaatggtgagagatgaggctggagctacggcaggtagaggcaaggcaaagtcatgtgacaagatttacaatctctcctggaataacctcaagcttagtgtgatcttaaaaatgtattttatagaaaagaagtaatttcattgcctaagtactcagaattgcttcctgttggtgtagaaaaacatacaggaactgttagtaatttactcttgcgatgaatcacacagccacatttatttttattgtttggcaaacacacatgtagcttactacatcagtcactcttctaagtactttataaatattaactaatttaatccttttaacaaccctacaaggtaagtaccattttttagcaacttgatatatttgccataaagatcacccattgtaagtgtaccattcaatagtttttagtatatttatacagttgtgcaaccatcactacaattcagccttagaatgttttcatcatctcaaagtcttttctttttttctttggtgcttgctactttgtagtcaatcctggttgagaacctgcactcaatcccactcccaccccctaagaaaccacggatcttctttttgtctttatagatttgtcctttctggaaatttcatataaatggaatcatgcaatacgtagtttttttttttgcatctgacttttttctacttagcataatgttcttgaagttcatctatgctgtagcatgtatttatagttttaaacattttattgctgaatagtattccattgtatggatgtaacacattgttgatggtcatttggattgtttcaggttgttgtccattatgaatagtgctgctgtaaatatttgcattcaagtcttggcatagacatgtgtgttcttttggatagatacctaggagtggaattactaggtctaatggtaagtctatgtttaactttttaagaaatggacaaactgttcttcaaagtggctatttaggtagatactatcatcatcatttcccttttattgaaggtgaaacttctacagtgtcataaagcctgtgaatggtggcagtaggaattgaacttatgccattcaccacgaacctctgtgaccttaacactaaactttgatggctacttcctttgtttaaactgtcatcagtttcaaaaaaagataataaataaataaagcttgccttctttcccttacctgatcttggtttcaaaactgctagagaatacgttgtctagttctgtccatggaattatgcctgcgggaatttccgtgatgttcttttccttctttgcttctaagatgattccctaggcaaatctcaggccactcaagtattttcattttcacgtcctttctgtgagaaacatgaacaaacctagggagtgttttgaaaatgagatttttaaactctccagtgacaaagtcctctttcctggaccaataactaccttcaaaataacattctagctactgacttagtctgtgtggctggtggatttctttttaatacagcagctggtaggctacaaagcacgtgtcagtgacaatgcatgggctgcctgtcaggagctcccgagccaattgctcagaggacccttcacctctggctggcaattgcttctttctgatgttaaaggtcaccacagcaatcacctactactgctctcaagatttgatgtgatcacaacactctctgcatcttcactttgccaaggattacaaaagaatgaggcagcccactgtctaacatgttcggagcaaactagtaaggagaggcactgtggggcttttaggttaacatacacatgattgatgatatgcaggaaggattgttcttgaagagataggaactacytagagcaaagactcaagcatacttaaggcgacagcaagattcctctggggtctttgagttctggtaatacattcttagggcctggatattttctatctaggtgctattattctgggaatgtaacttgccaaaaatcatgtaaactagtaaaaggcagaactgcgatcttaacccagcttccaaatcttaagccctaaaccatactgcctgccaagactcctattctccctaattcctttgtgagcttccaggctaagtgttccacttttatattctcatgccatctgtgttttctcttatcatggaccttaccatattacgttgaagtcatcagtatcctccaccatgctctgtttctgcagggaggaaaacgcatgtgtgtgtttttaacctcggattcggagagacttgagttaatcatcaactttaatttatagctcactattgtacacgaagtccctccttcgttttttttttttttttttgcttttggatggagtctcactctgtcgtccaggctggagtacaatggcgtgatcgcagctcactgcaacctctgtctcccgggtttaagcaattctcctgccttctactctcctgagtagctgggattacaggcatctgccaccatgtccagctaatttttgtatttttagtagagacagggtttcaccatgttggccaggctggtctcgaactcctgacctcaggtgatccgcccgcctgagcctcccaaagtgctgggattacaggcatgagccaccaggcccggcccccaccttcattttttttaaaaaaatctaatttttctcttcactcttgattccccattcacattattattgacaataataataggaataacagtgaacatttactgccaggcattgtttaagcactttatattaactcagttattcctcacagtaacccccatagagtcttactatttctatttcccatttttttcagacaaagaaacgttacagagaagttaagagacttgctcaaacggacagagtaagtgtgtgggagagccaggatttgaacccaactggtcaggctccataaaccatacggctctttcagacacatgcgctgttccggttgatgaggtccttggacgtgaatatcacttcctacaacgtatagtgtcattttgtgtgtgagatgtttttcataaacataaatggcattgggccacacagctctgcttctcatagttttcactctagacacgccctctatgtcgctgttggcacatcgagttcactgcttctgactgcggcataatattctatcctggccacccatcacactttactggtccattctccttaatgagggcaccttcaacttgctacctccacaaaaatgatgcaagaaacatctttatttatagcctttcatgaacctgtgctagaatttctcttgggagtgtactcaagagtggttctctgagtcaaaggatatgtgaatattttatttcaccaagtgttgaaggattgctctccacgttcaaacgtacaatttgacactcctgccagtagcaccagggttttcctttcttcacatcctctccaacacttggtaatttgtggctattctaatgcctgcaaaatggtaccctgttgttgcttttaatttacatatttctggttacaagtaagcatgagcacctcttctatgtgctgactatttgggtttcctctgcccattcatgtttgtgtgtttgtatgtgcaccaattatccttgcatagtccagctaggggtttcttgtagattttagatgttgtcaatctgtctctcacctgtgcctttcgttgaatggaagtccaatcaatttttgccttatgatttgagcttttaggaccttgtttaattagccattctttaccctttgctcacaaagttattctatgttttcttccattagatttataccttaaccttctgcatttagatttcttatccacttgggtttacctgtgtaggaagtaaaaggaaggtattcggctttacttttctccaaatagtaagcctcatatctaataccatctaataaataatctatcctttacccacttatttgtggttcacttttatcatatctcaagttcccctggacaaataagtctgtttttgtgctcatttttttgttgtattagtctacctataacttagtatgtctttagatctcatagagatattcgttattcaagaacccttattcctctaagttttacagtaacttgcttggttcatcaaaaaattaatatattatttctggaaagatctagtagatttgttggtagataaattccttgcttctttatgacttttatttacctttatatctttacttcgtagcatagtatctcacatgctcaataaatatttatagaactgaactattgttgaatttatgatctctttagtgactgggaaggagaataaattatgtaatgatggaagtcagatttgaggccatcttgtcttcttttgagtgagaaaagacagaggtggagagaaaggccagggaattgactcccttctgtaacagggacaactgtggctttggttttaattcttacaataactcaytaagattagcaagtcctgattgagaataactcctgcatagagctttagaagtggctgcacgtgagggccagtagctggattcccagtggaatttcaaggtcaaatatgtagcttaaactaggagatggcagtagaaaaaatgctgtcagtgaattcatataatcgaattagcagtttgttgaatgttaagttgcaaatagcgcagcggaaaaggtttgtgctgcagaaatgaggagcccgccatctagtggctctaagtctacatagcaccactggagctctagtcctgagtaataggacacccttagggtacttactataggctacccactattctaagaattttacacattacaacagtaacaccgtgaaacatagcttattattacccccccattttaaagatgatgaaattgaaacttagaggagttaagcagtttgccaaagtcatagagctaatactgttttgaaatctggactgtgtgactcgagaatcaatatactcaaactatttgctattatgactgcaagaaaaagagggcggtatgctaggattgtctcctaccagctagagagagtggatggtgtgcattctttccaaagccacattcagtgacatcacactggtagtttcaattctgtcatggtgggagtatttacactatgaaaaccagaaaattctacacatctgggctttgtttttctccccgctccacctcctagagagagctggtttgcagggtgagaaggactaagaaataagagacatactcataagcttttttttttttttttttttggaaagctggaaaagagatttggaaagtactgaaaacctggtttttgtaaaaaataaaataaagagaccttaagacttttcttctgatattttgtactagatcagaaataggtattttatgactaatgtagaacttcccaaaatgaagagagacttaccaaagagtatgcagttgctcaactgctttatgaggaaagaaaacaaaatggttacagaggctcagttgcaaagtgcatattaaaaatggcaaagaaacagatgagtcagaaaaaacaagcagaactatttttttagaggaactgaagctaaataaaacaggacctacttaaaatttcttgagatgggcaaaattgcattgcctatttcaagaaattttaagtaggtcctgttttatttattctgtatttgatctctaaaattcagagaacaaatacatctatgccaatttgcaggggatcaaatcagacactgagaatggccatgaaatttaggggaaatgacacaaaattgctacaacttcacttcttccccttatctaaatgcttggagtgatacacacacacacacacacacacacacacacacatattctctctctctctctcagttgggaggagacctttattcttgtggactacattcattaaacaacagcttgaagagatattacaatatgtaagtatggtcactaacaacctacattatgttacgatgtgtaagaagaacacatctgaggtttttttcttcacataatctgtggtaaaaaagacatgttaggaattccagcttgtggtcctcttcacccccaccccactttttttttggacatgcctctatagcccctcctgaaggaataggtgcaacaaattataatgtggtctcctggatataatttatggatgaatccctaactcaagcagtgctatattatactctgagaatttaaagacacaggaaacgtagtattgtatactggagctgcaagattgttcagtgttggggctatggcaaactggaattataaggggccatagactaatgagcgtccctccagtggaaggcggtttgaagagaggagtccagaacagatgtacagagagatgcagaggtcagagctatttagtgagaaaattgatggaaagaagagagaaggaaggagagaagagaaatgaaagaggagaagagagagggagactccctcatggttttttagttttcatgatgctcagtcatatttcttgcaaatgcctgaatggggttccatgagagcccttaaatcattttaataattctctcttttacttttgcttctttgagttgatttttatttcttgcatccaaatgatacatgattaagacatcatcaaagcaaatcagagtagataagcacaggaatcagcaaacacccagcagctgctgttgtcctctgagtcagaacattcctggaatgtacatttcaggaaaacatatatatatttaaaataacattagtttctttcttcttggtaataaagccaatgcaaagagatgtcatcaaatggttgctcagaagtcctggcacttgcctcttccacaaagaaggaccaaaacaataaatagatgataatcacatgttgaatagagcatctaagtgagaacactgaaattcagcaaggaagtgacaaagactctctcaagcatagaaactcaacatggcagcatagagaggcaagtgaagcagctggctgcgattggcttagagccaagaaggactcaccattttgaggaaaagctaagcaagagatgcatagtagtttatattctcatcacagacacttgcagttttgactacaggagagccaggcctagtgtagggagcttcctggggtccatctatctacattgttccagagagggcatttacactgggttttacccatgagactgaaactgccacagcagagcaccattttggaagcagagttaccagtagactgcatccagagagggcatttacactgggttttatgcatgagacccaaactaccacagtacagcaccatcttggaagcagagttaccgtcagactgcatcctggcctgggacccaataggtcttgcgtctccatagcccttgggctccaccaatatcccccaacatacactcagaaggctgcaatgtcacaacaccacctggacccagcagtgcaactgcatccctgccacccyagcccatgcagcaccttacactcttaggaacaggcatatcaagcagtctagcacaccaggaaggccgtctcaaaacacagggagccaaagcatatgctctctagaaactgaggcctacctacctggggctgccactgtcactggtggtccccaacccctccagcagtagaggtgctgtgtacccacatgcaccactcaggggccccaaaatcagaatgcctggacccactgctgctaccactagtgcctatgcatggtgcccaagagcctgaggatcaacccacccagtgcccaccactaccactgccagaaaacctgccccttcaagtagtggggctgccacatacctgcatgtgcctaccagggaaccaaagactggcctgcccaatgtcctcatttccagcaaaatttttccacagcctccacaaacaactacagtctaagtaaatgaggaactggtagacaccagtgatgttgactacagccaaataaatcatatggaaactgcactattgcactcactcagaaataaagccaaagcaatctacccaactgagactacagataaatccacaggaaaaaatatttccttattaaagctatttaattaaattagaagaagtgactgttgtgccagatgcacagatatcaacataaggacacaagaaacatgaaaaagcaaagaaacatgatgcctccaaaggaacmcaataattctccaataacagaccccacagaaaaggaaatctatgaaatgtccaaaaacgaattcaaaataatgatctttaggaaactcagcaagatacaagagaacacaaatagggaatacaaagaaataaggaaacaattaatgacctgaatgagaaatttgaaaaggaatagctataataaaaaagccaaatagaaatttcaaaactgaagaattcaatgaataaaataaaagtactgttgagagcttcagcaatagactagatcaagcagaagaatttctgaacttgaagacaaatattttgaaatagcccggtcagacaaaaagatataaagtacaaaaaaagaataaaaggaatgaagaaaacctacgtgacatatgggacaccattaagtgaacaaatatttgcattttgagagtttcagaagacatgggaaaaggcacagaaaatgtatttaataaaagaatagttgaaaacttcctaagtcatgtgagagatacagacatccagataaaggaaggtcaaacattcccaaatagattcaacccaaaaaggtcctctccaaggcacattttggttaaactgtcaaaaggcagagacaaagagagaattctaaaaacagcaagagaaaagtgtcaagtcacatataagggaatcsccatcagactaacagcagattttttcagcagaagctttacaggccaggagagaatgggatgacatattcaaagtgctgaaagaaaacaaaacaaaacaaaaaaccaaatggctacccagaaatactatgcccagcaaagctatccttcactaatgaaggagaagtaaagtctttctctgacaagcaaaaaccaagagaatttatcaccactagacttgccttaaaggagtcctacatctgggagtgaaaggacaataactaccatcttgaaaatacacaaaagtataaaactcactggtagatcagatacatgaatgagagaaagaaaggaatcagacattatcagtacagaaaatcaccaaagtcaaaaacataaaagagacaaagaaagtcattataaaatgataaaggaaccaattcagcaagaggacatacaattgtaaatatatatgcactgcacactggagcacccagatatataaagcaaatgttgttagagctaaagaaagagagataggtatcaatacaataataggtaagaacttcagcagaccactttcagctttggacagattctctagacaaaatcaacaagaaacattggacttaaactgttctgtagaccaaatagacctaatagacattgacagaatgtttcatccaacagcagcagaaaataattttcatcagcacatgaaacattctctgggatatactgtatgttatgccacaaaacaaatctcaagaaattttaacaaatcaaaatagtattgagtatcttctaaggctacaatgaaacaaaactctaaaacaacaagaggaacttcagaaactgtataaatacatggaaagtaagcaatgtccactcaaacaaacgtggatctatgaagcaataagaaggaagtaaattttttttgaaacaatgagaatagaaacaaaacataccaaaacctatgggatacagcaaaaatattactaagagagaactttatagcagtaaatgccaacatcaaaaaagtagaaagagtttgaataaacaacctcaaaatgtatctcatggaagtagagaagcaagaatgacccaaacttaaaattagtagaaggaaagaaataatacaggtcagaataaaactaaataaaatagagacaaaaatacaaaagattaacaaaatgaagcttgtctttttgaaaagataaagtcaacgaatcactagctggactaagaaaaaagagggaagaaataaaatcagaaacaaaaaaggagacattacaactgataccacagaaatgaaaaaagatcattagaaattattataaacaacaatacatcaacagactgagaaacctagaggaaataagaaaatagataaattccaggacacatataacctacaaagattgaaccaggaagaaatagaacacctggacagactaataatgagtaatgagatttaatcaaacctctttttctttataaattacccagtctcaggtatttcttcatagcaatatgaaaatggactaatgcagtcatgtattgtttgataatatgtaagaagacttaatcaaacctctttttttttgagatggagtcttgctttgtcactcaggctgggtgtgacctgagctccctgcaacctctgcctcctgggttcaagcgattctcctgcctcagcctcttgagtagctgggattacaggcacccgccaccacccctggctaatttttgtatttttagaagagatgggatttcaccacgttggccaggctggtcttgaactcctgacctcaggtgatcctcctgcctcagcctcccaaagtgctggaattacaggcgtgagccaccatgcccggctcaaacctctttttctttataaattatcgagtcttgggtatttcttcatagcagtatgaaaatggactaatacagtcacatattgtgtaataaaaagtcccccaacaaagaaaagcccagggcagaatggctttactggtgaattttcctaaaattttaaagaagaactgacatcaacttttctcaatctattttgaaaaattgaagaagagggaatttttcctaactcattctaataggccagcattatcccgataccaaagccggacaaaggcacaacaaaaaaggagaaaacaacaggcaatatccttgatgaacatagatgcaaaagttctcaacaaaatattagggaactgaatccaacagcacatcaaaaagatagtataccatgatgaagtgggctttcccagggatgcaagaatgtgtcaacagaggcaagttaataaatgtgatacatcacatcaaaagaatgagagacaaatgcaatatgatcatctcaacagatgcagaaaaagcatttgataaaattaaacctccattcataatgaaaactctcaacatagggacttgagagcttaggaattgaaggaacatacctgaattatatatagaaggaacatacctcaacacaataaaggccatatatgacaaacccaaagctaacatcctactgaatgaggaaatgctgaaaacttttcctcaaagaaccagaacaagagaaggatgcccactctcaccactcttcttcaacatagtactagaattgggcaagagaaagaaatatggaaggtgtccaaactggaaaagaggatgtaaaattgtcccctccctttttttttctttttttaaagatgacatgatcttatacacagaaaaccctaaagacttcaccaaaaaaactgttagaagaaatactgataaacaaattcagtaaagtttcaggacacaaaatcaacatataaaaatcagtagtgtttctatacgccaatcaccagctcatyaaaaaagaaatgtggaaaacattctcatttacaataactacaaaaaaagtacataggaataaatttttccaaggaggtgaaatatctatacaataagaaccacaaaacactaatgaaagaaattgaaaagggccacaaaccaatagaaagatattccatgctcatggattagaagaattaatattgttaaaatgaccatcctacccaaagtgatctacaggttcattttaatccctactaaaataccaatgacaatcctcacagaaatagaaaaaggaatgctaaaatttgtatggaaccacaaaagaccctgaataaccaaagcaatcctgagcaaaaagaacataactgaaagcatcacactatctgactttaaattattctacaaagttataataatcaaatcagcatggtattggtataaaaacgaacacagagaccaatggaacagaataaagaacccagaaacaaatccatgtgttaaatatttagagtcaactgatttttggcaaaggtgtcaagcacaaacactggggaaataacaccctgtttgataaatgatgctgggaaaactggacattcatatgaaaaggaatgaaattagacccctatctctctccatatacaaaaatcaactccaaatggattaaagacttaaatgtaagacctggaattataaaactactagagaaaaacataggggaaacactccaggacattggtctaggcaaaaattttatgcctgcggctctaaaatacagacaacaaaaccaaaaatagacaaataggaccatactaaactaaaaagcttctacatgataaaggaagcaatcaagagagcagacaacctatagaatgagagaagatatctgcaagctatacatttggtagtgtactaatatccagagtctacaaggaacccaaacaactcaatagcaaaagaccttaacaatctcatcaaaaagtgggcaaagaatctgaatagacagttctcagaaaagacatacaaatgaccagcaagtatatgaagaaatgctcaacatcactaatcatcagggtagtgccaattaaaaccacaatgagatatcatctcatcccaattagaacaagctattttcaaaaagacaaaaagtaataaatgcttgtgagaacatggagaagcaggagctctaatacactgtgggaatttgaattagtacagccattatggaaaacagtatggaggtttctcaaaaagccaaaaataaagctattatatgatgcagcaatcccactactgagtatttatccaaggaaaagtaatatattgaagacatatctgcatcctcattgtttattgcggcactattcacaatagtcaagatatggaatcaacctaaatgttcatcgacaggtaagtggataaacaaaatttggtatatatacacaatggaatactatgaatccacaaaaaagaatgaaatcctgtcatttggagcaatacgaatgagcttggagatcattatgttaagtgaaataagtcaggaatgaaaagaaatactgcatattttcactcatatgtaggagctaaaaatgttgagttaataaaagtagagtagaattgtgtttattagaggctaggaagggttaggggagaggattaggagaggttggctaacagatgaatcacagctagataggaataagttctagtgctttatagcattgggtgaatatagttaacagtaactgcatattttcgaaagctagaagagagccttttaatgtttccaacataaagaaatgatacacttttgagttgatggatatgctaattaccctaatttgataattacacattgtatacatgtatagaaataccactcttagatatgttctattattacatgtcaattaaaaatagaagggaaaaaagttgaattagaggaaacacataccagaagaatgatgtatattttggtatatttcagatagtgtggatttcaaagatgaatcttgaaacccaattaattttaataggtactaaaaatttaactggaatgaaaagaacccacaaaatcttttaggctaaaggtactagaaatatttgaattatataataaacctcatcaaaagccttcaacagtgtgtactggcactatgttaatggttgagtagtggttacataggggatgtaccattacctgcttttgtatatgttttaaattttccaaaattaaaattgtaagtagaacctaaccatcaggccctttcagtgattgtacgtagtgaagtgaatagaatgaagcatcaagagctgccagaaaaggtagtcctgagatgcagtgtgaagggctttgcaggccagtcagaaggtttttgcataatgagaagcctttggaggattttaagcaggtggggtgtgtgtgtgaatgtgtgtggtggtgtgtgtgtgtgtgtgaatgtgtgtggtgtgtgtgtgagtgtgttggtgtgtgtgaatgtgtggtgtgtgaatgtgtggtgtgtgaatgtgtgtggtgtgtgtgaatgtgagtgtgtgttggtgtgtgtgwgtgaatgtgaatgtgtgtggtggtgtgtgtgtgaatatgtgttgtgtttgtcaatgtgtggtgtgtgtgaatgtgtgtggtggtgtgcgtgtgagatggtgtgtggtggtgtttgtgtgaatgtgagtgtggggtggtgtgtgtgaatgtgagtgtggtgtgtatgaatgtgtgtgttggtgtgtgtgaatgtgagtgtatgttggtgtgtgtgtgaatgtgtgtggtggtgtgtgtgaatgtgtgttggtgcgtgtgtatggtgtgtgtgaatgtgagtgtgttggtgtgtgtatgtgaatgtgtgttggtgtgtgtgtgaatgtgagtgtgtgttggtgtgtgtatgtgaatgtgtgtgttggtgtgtgtgaatgtgagtgtgtgttggtgtgtgtgaatgaatgtgtgtgttggtgggtgtgaatgtgtgtgttgtgtgtgaatgtgagtgtggtgtgtgtgaatgtgtgtgttggtgtgtgtgaatgtgagtgtgtgatgtgtgtgaatgtgtgtgttggtgtgtgtgtgaatgtgagtgtgttggtgtgtgtgaatgtgtgtgttggtgtgtgtgaatgtgagtgtgtggggtgtgtgtgtgaatgtatgtggtgtgtgagaatgtatgtggtgtgtgtgaatgggagtatatgtgagtgtgtgcatgaggtgtgtgtgaaagagtataagagtgtgtgtgtgtgtatgtgcggttcaagtgaatgtgtataggtttcttgttcacaaagttatggaattggtgtgaatatcatagctgagttgaaaggtaatacttgttacctgaatttagcctcagtcatttgggtggagcttagggtgaccaactgtcccaggttatccaggacagagaggttttctgggttgtggaactttcagtttataaaatctgagtggttggtcaccttagtggtggcaatagataaagggtacaaattgtgagtagttgtatgtttgaagggtacttggtggataaggaaatagaagaaaactcaggcagctgaatagatatggaagtcaagggtgaagatctttaaaacagagagagtggccaacagtgccccacccttaaggggatcagaggcaatggagactcaggccacaggtttgactttttaaaatattattaacttattcagatcaggacttactaggcatgttttttagttatttagccttcaaaaaaaaattctgccattgggtacaattaatgccatcagtgccaaaaacgtaaattagaatatagacacaaaacttagtgaaataactcatgaaagataaaatattaggcaaaggtgtttgaatcacttaacaatttgattagataacaaagaggttaagaccatttcttgtagtatttggagatatttaatttttattatgttaagataaatctcacataaatcttaacaaatcttagttaactcttatgagtagagtgtgagtgtcaggtgctattccactgagcagtgagatgagggaagaacgggcctatggggtcttggtgttttccgcaggtcacattgccactccctccctgccaagcatttccatcactcatggtctcagctgcactcagggccgccagccataatctactctccagctactggtttgaataaaccactgatttatttgcagtcccgagagctgtaggcaggaaatgcaaacagcagctttccctcgggagggctagatgtaatgggacccttctctgttttccatcctcaggctctgatgggaatctctgaggaagctcagtggaaaatttctttttctctcagccctgatttctcctaaatggctcagtaagaccgagagaaaaggattttgtcctgagttatctgctccccacggtgaaggaactagggaaagaagatcaggattaaaaaattgtttttagaggataggcgttttaattgtgcacatttgaggtttagggtacattcctgactccacagtacatagatgactactcaggaatttttcacattataatttaatccagtattcttttctagcctgtgtactcttggagggtaaaatttttgttgagttgatctttatttactaaaaatgcattaagaaatacatttttgttgaatgaatgaatgcacttatcttcatatcgtggtttacaatttattatagacatattttatttgagtctcatagcaaccatgtgtagcggatgttatgattatttctgctttccagatggggagactgaggctcagaaaggtttagtgactttcccaagatcacacagaatggagactgaagtctagatctttgacaccgaatgtagattctttctatacaccacatttcccatcattattcaataaaccagcctgttgcttagtcatctaaaagaacacaaaaatacaaacattgccctgctggatcaaattcacaaggagaaagcactcagaaagcytagtgttcaacctcaacagagatggtttgtagaggcatgactatttcaaactcattgttatcaagtgagtagcttcagggcaatagctttcaaagccttaaggagaaacaaaatttgggctccgtgtctatccttagcaggtgggagacaggggactagaacattagctttctgtttatttttttattttatttttttacaaagagctagtggactctattttaaagattgcacagggacagagaaaagctggagaaattgaaagtggcaaaaatattggggaagttgccacgttcaaaacatggcaaaaattcataaaaaaggatgagttcatgtcctttgcagggacatggatgaagctggaaaccatcattctcagcaaactaacacaggaacggaaaaccaaacaccgcatgttctcactcataagtggaagttgaacagtgagaacacatggacacagggaggagaacatcacacactggggcctgttgcggggtggggggctggtggagggatagcataaggagaaatacctaatgtagacgatgtgttgatgggtgcagcaaaccaccatggcacatgtatacccatgtaacaaacctgcacattctgcacatgtattccagaacttaaggtataataaaaaaaaaaaaagaaagaaaaaataacatggcaaaagttgccacaataagtatccctggttttgcaatgaagtgtgactgggtcctggggaatgctgtgccttcaggggtaggagaacatgcctgagtgaagggtctgcaactgcagcctgggggcaaatctgacccactgattctttttgttttgtatggcccacgagatcaactaagcaaaaatttcaccctccaagagtgcacagctgggaaagaatggacatggctgtgctccaacaaaatgtcacatcatgaaatattaattttttaaccatttaaaaatgcaagaggcatttattaaaaatgcatttttaatggttgaaaacattaaaagaagaataatatttcatgacacgtgaaaattatatgatattcaaatgtcagtgtccataaacaaaattttgctggagcacacccatgtccatttatttattttttgaatcaccatggtggcttttgtgctgcaacagaagagttgaattcttctggaagggactgcatgtggcccacaaatcctaaaatatttactctctggtcctttacagaaaaagtttgctgacccctaacctagtgcctgttaggttcaaatctacactcagataactgtcgggcagctaaactgtggaatactagatgtctttcatttctgacattgtcaggaagtgaacaggaatccaattcttaaggccaccctacacttttcacctgccacttggatgactgaactactggatccatggccatgttctgccaccaagcctgtgggactataaaggctaagccttctgtgtgcatctggcccagtctggtctgtccttttcatatctggcctgctttaaatatcctcattctagatgcctctcagtgtcactccacttccctttggaatactaacagctaacatctattgatggcttactctgggtcagatgctgtgtgctaaacactttaccccattcttctcttaggatgagataaccctaggaggctggtatttcccattattgttcccattttacagatgtggacactgaggttcagagagatgcaataacatgcccatttgcacaccagtaagtggcagagccaggacccaaacccagtctcacgactctgggaactgcacgggcgggggtgtggaagttgaggggatgcaggtttttctgttaatgctccaccctgccttggatcccctcctgctactgctgccatactaaacctagggggtggctggtacttttctttcttgggctatcttcaaaaccacttttctcttattttcttcttgatgcaactgaaagagggtagaacattcataagacactttgctaaaaaaaataagaaaaaccaaatgagagacaaaccaggaaaattttttacaaatctgtattcttcctactgacgttgtttgatgggctagcgccacagacacagagcacctttgcaataccacactgggagggaagagtccaacccagaaatgctcctcttcaaagctcttggaaaactttgttttgctgcttacagggtaatccccacaggcctaggcagaattgtcagttaagagcttctcccaactgagagtggccaagattaactcagcactcaacacctccacatcttcccctttaggttcccactgccccagcccttcacaccacccattttctgctgtctgctcccattttccgcccaggcctgcccttcctgggccatgtcacaggctccaaaatgcttccatcttcctcctgtcaacagaaacttgtagcagtgtaacatgttacctcttcccagcatacacttgatttgagcatttccctgaaagttttgcctctcctattttaggcaacgcttcccccatttagaaaagggtacagagagttcccccagccttcaaacattacagactggctttttagccgttctgtcctcctctttctcccccaaacaaatctttctgagtacataagaaatttcctcctcttacctctcttctaaagatttttcttggctgggtgyggtggcttatgcctgtaatcccagcactttgggaggctgaggcgggcagatcacaaggtcaggagatcaagaccatcttggccaacatggtgaaaccccatctctactaaaaataaaaaaattagctgggtgtggtggcacatgcctgtaatcccagctactcaggaggctgaggcaggagaatcgcttaaaccagggagtcggaggttgcagtgagccaagatggcaccactgcactccagcctgggcgacagagcgagactccgtctcaaaaaaaaaaaaaaaagaaaactatatatatattccttgtctccagaggagagggagaaaacgtaagacagatgggaaggcttcctctctcggtgtcttttttttctttccttccatgatctttcctaatgcacaagttgccctgtctccaacaagacataattagttagcccttggtttctgctcccctcccccagcacaagacattttagactggttggacttatagtttcttttctttttattacatagatgtttcttccctgctgccccaagtaaagaatgcctgagagaataacagatttcctgtagaataaaagcaaagaaaagccagaaccacagtggaattttagcagacaccgaagtagttggaaggggaagatgatactggattgtgggacaatctggtgcccataaagtcatagcccttagactggccatggctgccagtctagcctttatttgcaaggactcgaccaggtatgaggaaagaagccagataccctgcctctgggctgggcctgccagactggaatccattgctaaccaaagtccccttacctgctccacatgctagatgaatattcagagtgactttgtgggtaaaggaatccttcactctatcactttcaacatcccgcagggctgtggggcgagggagatgatgtagagtttgcaaggtgaaaacctgtaataatattgagaccacagcaagccgggctttgcatttggttacagacttttgtccagcagagtcgattattgtcttcatttaggacttctgattgctgtctaaagccagacaacttgaagactaggtattctgggtctttctgagtgcttacttgggttttacatacagaagaaagagaattggagagaattttatctcgttgaaggcaggccaacatgtgcatcgataaggatgttatcatccttggagcttttgttagctatgtgctgccttaggctcttgctagcaatgagatgatatttcttcatagtaagtatggagttatccactttgtggtcttgacatggttcatgttaatataatggcaactttaaatcaattttctctctaactctgtaatgcatcagagaacccttagtgggtacatgacccttttatcaatatatataacttggaagaaaatgtatatttctctattctagggactggaataaaacttcaatatctaatttgtcttactataacaaataccgcctgaaatagtcatataaataactatagcttaagaaaactatcaaaaatgtgtgttttattaatattttacttttcaggtaaataagtcccaagctgtctgagctataaaggaatctgtgtgtgtgtgtgtgtgtgtgtgtgtgtgtatgccrtgtgtctgtgtgtatgccgtgtgtgtgtgtggtttttgcagtttatggatgtaaggaactctctctgaaatgtgtgcttgagagcgctggagctcagaactagactttgctactgacctcatattttcatttgggggctacctaagcttggtatgatccacagcattcttttttcattttcctcaataatcatgatttaaaacttacctaataaaagacaacttcagattcctaacgttcaagctctaagatatctggggagagggtgtccaatrttttgtgaacagctctttgagacaatgctgctggaaccatcctgaacaatgacaatggagaataatgtttttcctcttctccagcagcctgccccaagtaacccgctcttgccccactatttacttcaaggtaacccagaactggtaaaaccagaggcacaggtgccgctagcattgccacagagtcaggagctgagcaaaacagacgcttacttactctggcctcttccttttctctttctgcttcctgcccacttcactcttttccctgcattctttctttcctctctgctcactttgtcccctcccatttggagaaataaagcattgaactgacccttcacatatccatctgccgttctataactcatctttatctgcaaacatcctctctagactattggtttttacccatcccctcccttttggcattatcttctggaactcctgggatcaggatgtcaccctatcactccactaatggcacacatggcatccttttagtcaaatccagagcctttttcttcaccctttactttcctcggaactctgcagcacttgataatttccagcagcctttctttcctgaatcttctttttctgtagccactctggtttcccttctaccccgtggactgagtgctgtgctctgcttcaccagccctaactgtgtgttagttgggtgtcttaagtaggatgatcatgtaattcttcatccagaccatgatattcttgagaattaaaggatgctcaattgacaacagacaataaacagagattgtccctggcaaaccgatatgtctggccaccctctccttaaggctcaggaggagaagaaagtggagagatctcagggcaggatatgaatgaacatagttcaaggagctttcaaagtccatcttcaggtttcttagttacttctgtttagaatctcaagttaaaaattcagcttcatatttataaaaggatcacgttatctgagaagtgtcagagcaggtttgggagagaagagacgggtgaggagagagttctacctgaggcaaaggcagaagtggttggaccaggtcccgcagaactccgtgagttccagtcacagagtctgcccttttaggtaaagaggaacttggtgctgaaaccgcttccaggctcttctcagcccagggttgcccaagatcagttgtactgagtggccggcagggtaggcagccatgatgatcttgcacaaaatattccaggaactgtaagtgtcaaagatgttggacgtggaaagaaatagagcaattgcattgaaaatgtagaggatgagaaagtagctggtggctttgatggcccctatgtgagccttcatgctggggtccctggaccctgtggcattgcttcccatgtgtagggtgtgtctcttgagagagaggatcagcagggtggctgccaggatgaacatgatcagaggaacgaagatccccatgttatagaaaaataccaggttgaccatattggtctcakagaagtacttcttctccgtggagttggaggaggggataggaatggagctattcacatacacattgaagacatctctcgagagaggaaagctgaagcttaaggaaaccaacactgacagcctgagaagccaaggcatcagcactatgattttcctcttcatcaggaagaacaaaggatgattgaagtttgcaattctaagacaatagaagactttgagccaggcagcaaaccagagattggaatggttcagaaagacagtgatgactttgaagaggatatacactgagttttggttataaacaattcggaatagcagactgaaaatgttctccagcatcatccaaatctgtagcaagagcctggaaaagctcagcatcaacataatgcggtcaccagtggggagtgttttgcccctggcccactcagccccatagatggccgtgatgaagccactcccaaggatgccagtgatgcactctattccggagaccascaaagtgaaggtgaccttgaacttggatatgtctttatctgtggcatctgtgttcaccgttgccattctctttgatcctgactttcaggtttctgcgccaagaatgggtaactgctctgcaatcttctgacccttgctcaatgttataatttctgccgccctcattaatggttatttccaatttttctccatttgtttatcacatgactacaagttagaggcttcacatgcaaataatgagaggatctggttactgggtctgtctcaatttttcataaagatacatttgtcttgggctttcagaagctcactggaaataatttgagacatgtttctagctcaacaccttcttaccttatttactttaagtccacatttacctgataagcaatgaatacaaggcctttttacttgtctcacaagatctctgttacctgctaaattatttgtaaaagctcatacagcttttaaaatctgttttccccacttcttttcttgtctctcttattttgggagagagttttattttgatagttaccatgtttgtgaataagaaattcccataagctcatatatgaacatcttttacttagaattgagtttcttccaaaaaggcctgctattataatgtcctcgaatagtatatagaaaagccaaaattggatgctattcgagttggagagaaggaagtctccatagtcccagtttttattgtttgtgtatgtgtcatcaatttcagcttactgagatcccacatgactatttgagctcagaatcaggtagaatgagcctggggagaattcagtgttctggacatggtgttgaagtttggaaatgtgataaggtactatgacttgaaatttaatttcctactttttaaccctggctgtgaaccagaatgaactctggcactttacaagaatatgtagatgcccaggactcgtccaaatctaggaaatcagaactggactagggctcaggcatgctatcttttaaaaaagccgaaaggtcttgttgctcatagtcaggattgagatccaaaatcttagctggaaaccaatgagccttgggtcagatttggcctgtagtcattttaccttgcattggttaatgctgtacagcattaatccaccagtgtgtaacttttctttttgaggggttctattggcaaacatttaaacttaggagattacttatatgcatgcacaaaaaatctatcttctcttgaaaaattagaagatttggcagtattgggtcttcatagtgaactggctgaagctgagtaatggctgcccattttaaacaaggtatatacttttcagtttgttgacaatactaattcctagtgtcttcttgacacagaagctgagtgccagttatcattttccagtgtgcttaccctgttatttttatttgattatttttctttttgagactgggtctcactctatcacccaggctggagtgcagtggtgtaatcatggctcactgcagccttgacctccatagctcaggtgatccccacacttcagccacctgagtagctgggactacagatgcatgccaacacacctggctaagttttgtattttttgtagagacagagtttcgccatgttggctaggctgatcttgaattcttgggctcaagcaatcctcccatctcagcctccgaaaatactgggactataggtgtgagctaccatccttcacaccttggtccattatattttgggccttggtccattatattttttaataatataaattgatgaatgataaaaatgggtttccccaccccaaattaattttatttaaaataaggaagttggctgggcgcagtggctcatgcccgcaatcctagcactttgggaggctgaggaggaggattgcttgagctcaggggtttgaggtcaggctgggcaacatagtgaaaccccttctctaccaaaaatacaaaaaattatctgggcatggtggcatgcacctgtggtctcaactactcgagaggctgaggtgggaggatccttgagcctgggaggcggaggtctcagtgagctgagatggagctactgcactccagcctgggtgacagagccagaccgtgtctcaaaaataaataaattaattaaataaggaagtagagatttattatttgtatagaaataagcaccaggcaaagcaatatatttcaaaattaagaaagcattatttagggaaattaaaacttatgtcaacacggagatttgtacaaaaatgctcacagcagctttattcataatagtcagaactggaaacgagatttgttggcaggttctgcatctcctgtaagagactcattaactttggttagttctcttaattgaggacagtagtatttgtcagcagctttcacgtattccaaagcatcaaactcactttttggtttattttgtcccaacatatgcaagtttgtaataaatgatatctccccaaatttctggcacacaatcgttgacttccattgttctggtactgttttctattggtcttcattcatgtttttctctgattttaagaggtgggaacagaaggagatcttgggcagggtctgcctgcagccccagaggctcaggcaagaggagcagggaggggatcagccattggggtgtgggactattgctgaggctcaatgcaagctggcagtctgggctgacaactccaaggcactcacagtgccacatttatagctatgtggggccaattcatttttattccatattttatcatttggagagctagaatggaggcatcatctctactttagagaagttctttttttatttttatttttggagacagggtcttgctctgtcacccaggctgcagtgcagtggcacgatctcagctcactgaaacttccccctcccaggttcaagcgattctcatgtctcagcctcccaagtagctgggattacaggtgtgtgccaccatgcctggcttatttttgtatttttagtagagacggggtttcaccgtgttggtcaggctggccttgaactcctggcctcatgtgatccacctgtcttgccctcccgtagtgctgggattacaggcgtgagctactgcacccggcctgctttagagaagttctcatgggggtcttcaaggaacaaaagtttcaaattcttggctacgaagtttaaaagctttggtccaggcataggatagaacagattggaagaatacacctattcttccaatgtttccagggaaacatttttctttcacatctctctccatcactaccatgtagactagaaaatgctttcccagttggagaggaatgaaagaagaggaggcaggaaagagctagagaaggtaaggatctcttttgaaggggtcccacatcttggcccactgctcatggctgcatgggggtgtcaaaggcagacaggctgcaagagggcccctgagtcccctgcagcctgtccacacttgggagagctgttcaaccttccttgtgttcacagaaggagtttggaaatctgctaagggagttatcggattccatggggtctagtggccatatcaaggagactttacaagcatgagatcaaagtgtggacacgtgaattgacatcaacgtaaggacaggaatgaccacagtatagactctacatcccaccttcatgccaaatctttgagtgactcccaaggagcataggtgtccttcatggaagacaagaaggagaaaggagaagggataaacacaacatgtttctccccctccagtttcagtgccccattctgtgcttcccatccaattgtaatgtcttgggcaggttccaaatgttcgtcttcttttggttattaatactcagtccagtttaatttcatatttggtttaagtattatcttctgcctttccccaagcacagtttcagctgacaccccatctgctaggactgggaggagacaaggtggaccctgagacacccgtctctccctcttcagtttttggctagtgtatgagagagaggacaggcagaagagtctctttatttccctggctgctgttgtaaatgcactcttttgtgctgctgctgctcccctggccaacaccatctggccctccatgacttccgggtgccagatatccatatgttggctgtcttgtgaggatctcatgtgagtcttgaggaggctctgcagcaactcttcactctgctgcccataactcccataggccccccttcttcctccctaatctttctatatgtgcagactcaggtggagggctgctgctgggatcctggccatttgcaggtactgctgcctcttattaagctttgcaggtagatatttggcctcaattgttggctgctttctttagatctgtttttctcaaccctgtccacattctagaattacccttatgactggaagggcttttgcaaagcacctatacatatgtcccaccctcgaagattatgaataattgttctggagaacagctaagcattggcattttcaaaactccccactgtgattcttatatgaagcaggacagggttgagaatcactgccctttggggggacttacccttatggtttttagtatgagctccagggttacttggggcaacaggaaaagtggccctcaatatctttgtagaagtgaccgaatgacttcctgaagaagactaagaggacatatcgtttatcaggtggtaggagaccaaattcagagattgaattaggaaaataattataacattttgcagaactgggtttttggtggtgtgaagtcacatctacccaatagtattagaaaagtagcatatttcttgtagtcatatctttattaaaagtaggaaaaggaagatagactgagggggtcatatgttcctcctgtgttcctcatagaaccctcctgtgtgcatatttggcaaaagatgtaatttaagaaaacagtgtaggtgccattatgaaacaaaccactggaagaagaaagaagagggccatggaagagacatgtgatcaaaacctaaggagctgaagagagaattgtaatgtcaacaaggtttgtcttggttgtttaagaaataagaagtcataaataaaaaatctgcctgggacatcaaattcttcacagatagcaagttgtaaaagagaatctactgaatgtagcggaaattgtgtgtcctgaaaagatacaagcacgtgcaaatgtaaatgtaactagaaatactgttgctcaatgcaatggaaatgtgactaagaaatgaaaagaaaaatcatgtgaaaaaatttttaaatggtggcatttgctattgcagttggtgaagatacatatttagtaatatttagatgtagtaatgagctctattaaccaccatgggggttaagaatttttatatgactgaaaaatattttggacagtgtgctcatgacagacacaaccttaggaaatgattaagaaaataatttttttgtgtgtatagaggaaactttcaaacaatttaatgcagaagacttgtgtgcctataggatgatattcctgggatgagcagtgtttatatcagacttgcaataaaacttaaactctaggtggcaagttatataaagacacaggctttacatctacttgcttgcattatttagcaggaattgctttctgcgagaagctaaaaattgaagatgtcccgaacacagcgttcatactgtgagctggatctccttgtagggcttcaggcacagagtgttggatgcactgtgtgatgaattggacacgtagcatggcagtctgctcatgacacagagggtgggtggcttagtcatggctgaaagcaaagcagcattgttgaacagttaagagaaatgaacttattcacatcattggagggaaaaaagctttgcttatgttaagcagcgaagattgttatcatataattgacctttggggtagacaaacactttgaatatttccccgcaaaggcatccacaaagcagttataaaatgtagaatagagtctgctgccaagggtgttaaaaaaagaaaaaaaaatgttttaggaaggcatatctggcatcgttactaagtcctcttttctgtggttggaattagtttctagaaatacaactgatggcctgaaacctgtgataaaaattgtgatacactgaaaactgattcctcaaaatggcttattgatttcagactttgtgaagataacctcccattgttcaatgcaccttgtcaattcctacttatagtgtgaaaaatgactcatggtgtgatataggattggacattttgtacagtgacactggaatgccaggcttctacaaatatcttcacagttgtgcaaagactcatattttaaaatatctacgtttttgaacagctctctcccagtattaaactaattaggactaattatcacttctagttaatgggtcccagtcaaggctgaattctgttttcattatacaacttaacacaggtttaacaaggacatattggtactgaagaaaaagtgagcaaattgtaaaataaaatactagaaatgaaatatttatattttatctttttttcaattctgaatttaagatacaatcttcaatatcacatatatattcatacacatacacattatctggtatggttgcagtcttagtttagaaaaataaacacagtgattattttcctgacagttggtttgttttgtcatacggctgccatgttcgcccgtacaccttgacgtctctggcttctgcagaccctggagttttgaatgagctcttccaggcctaggtcttacttaggaatggattatgtgttagcagtaaagcttattaacagttttcaccacaagatggagccttatgaatgcctctcggaaaagggagcaattccttaattcgcccactagtgggcaggcatgctctttctaaataggaaacttctggggaaacctttcaaaacctatttgagacaattgactgagagttttacctcctctcttctaaggaggtctctgattctttgtacttatgatcagttatttcagacagttttcaagagaaaatttatattgtctcttaatcaagcctctttaaaaaaaaatatattttagtgaaagggtcttgctatgtggcccaagctggagtgcagtggctattcacagatgcattcacggtgcatcactacagcatcgaactcttggcctcaagtgatcctctggcctcagtttcctgaggagctgagattataggcatgtgccactctccccaaccacatatacttttaattaacagattggtcagtatatttttgcaagataaattgcaaatgaaaactatagtccttaagtagactaactttaattgattacagatgctatttctaaagaatccaaaacatgctgggcgaagtggcttactcttggaaccccagagtaatttcaaggcaggagaggaggccaagacaggaggattccttgaggccaggagtttgagaccagctgggcatcatagtgagacctcatctgttaaaaaaaaacattagccagatatgatggtgaatatctatagtcccagctacttgtgagactgaggtgggaggattgcttgaggtgggaggttgaggctacagtgagctgtgatcacgccactgcactccagcctgggcaacagagggaaaccctgtctcaaaaacaaaaacaaaaacaatccaaaacattagaatgatataatgctactgctgccagtgacctgcaagatggcttagcacaggagctccccatataggggtgagtaaacgaagtccttcagaagtgaggggaattgaccaaagccatacacctactgaggtattattggactatcaagcagagggtctcagaaagtcccttcacacttgcatttggattttcattaaaattctctgctggatttttttttctgccaatgaggtaatttcttgcctaattaggttcttctcatccaacccaggaaatggctataaaatctcatttaggcaatgttcaacaatctttttgccctaaatgaagtaattacctgcgcttgggtatagacacatacagtggccattaattttcaacaaaactggagccctttttattcattcaacaaatatttattaagtgcccacgatgtccctggggataaatagtagataagacaggttcctgtcttaagaagatgtacatttgaatttgtatgtgtgtttgcagggggtaggaggaaggggagatatatggtttggctgtgtcctcacccaaatctcatcttgaattcccatgagttgtggaagggacctggtgggagataatcgaatcatggggggaggtcttccctgtgctgttctcctgttagtgaataagtctcacaagatctgatcattttataaagaggagttcccctgcatgagcgctctctctttgcctgccaccatccatgtaagacgtgacttgctccgccttgccttcctccatgattgtgaggcctccccagccatgtggaactttaagtccattaaacctctttttcttcccagtcttgggtatgtctttatcagcaacatgaaaacagactaatacagggagtaagggagtttgggaagggtagacaataaacaaataaataatataatttcagatggtgataagtgtcataaagacaataaggtattgattttcacaagggtgccaaaactatctggaggaaggaaaactcttaaaaaatggtagtgaaacaactgaatatccacatgcaaaagaatgaagttagacctccatcttacaccatatacaaaaagtaactcaaaatggatcaaagatgtaaatataagagaacataagtgtaaatctttgtgaccttggattaggccatggtttctcagatatgagacctaaagtacaagcaatgaaagaaaagtaaatataataaattgggcttcataaaaattcaaaagttttgtgcttcaaagggccctatcaagaaactgaaagacaacccacattctgggagaaaatatttgcaaaatcatatatctgataagggcctagtattcagaatatataaagaactcttacaagcaaacagtaaaagaaaactcaattaaaaaaatgggcaaagggaatgctgctaagagatgccaagaagaatctgaactgacaggcctggctgggttcttcctttcagtctatgagcatttgatcttactctttttgtccaatcatgtttccatactttgctgaaccatgttaatgtttataaacatgggcagtttcccctggatctctgagtcttcattctgaagacggctgtgtcacatgagctgtgataaaataactttgttatgctcttctatttgaaaaataatggaagcaatggacactgagactccaaaagcagggagggggaagggaggcaagggttgaaaaactatctattgtgtgttcactatttgggtgatgagttcactagaagcctaaaccctaacattatgcaatatacctatgtaccaaacctgcatatggacccctctgaatttataatttaaaaaagtgactgttcccttcttctgcctctgaataaacttctaccataatgttcccctcccccgcagaatgggcaaagggccaggcatggtggctgacgcctgtaattcctagtattgtgggaggctgaggcgggaagattgcttgagcccaagagtgcgagaccagccaacataacaaaaccccatctctactagaaatgaaaaaaaaagaaaaatagccgggtgcagtggcacatgcctgtagtcccagctactcaagaggctgaggtgggagagtcacacttgagtctgggaagtcaaggctgcagtgagccgtgattgcactactgcactccaacccgggtgacagtgagaccctgtctcaaaaaaaaaaaatgggcaaaggatttgaatagatatcttttcaaagaagataytcaaatggccaataagcacatgaaaaaaatgctcagcatcattagtcattagggaaacacaaatcaaaaacacaaggagataccatttcttacccactaggatggcaaaaataaggaagatgatgacaagtgttgacaaggctatggagaaactggaaccctcatacaccactggtgggaacacaaaatggttcagtcactttggaaaacagttcctcaaaaagttaatgagaaagtagggagagggaatagagagraagtgggcatagggtagtgatgggattattttaagagaaggtttcagtaagaaggtaacatctgagtggagtatttgttgaaataatgactggagaaagcacataaactttgctctgctcccagttttctcttcttttgtttgtaaatagcctttctttgatacataaacattagattgtatccttccctactccagttctacaartttttgtaaaagtcactctcaggaaataaaagtcatcattctttgatgacaatgttggcctacagtgcttcctggcagaattagttaataagcagctgtctaagtcccaataattccgtacatatctttatcttttttttttttttttgagatggaatctcgctctgtcgcccagactagagtgcagtggcactacctcagctcactgcaacctctgcctcctgggttcaagcgatcctcctgcctcagcctcctgagtagctaggactataggcacatgccaccacgcccagctaatttttgtaattttagtagagatggggcttcaccatgttggccaggctggtctggaactcctgacctcaggtgatccacccacctcagcctcccaaaatgttgggattacaggcatgagccatcgtgctcggccaggaaagcactttaattggaagtcaaagagttgcttgcttgcgatcagggtattccaaccttgacagtattaacattttagaccagatagttttttgttgttgttgtggaggctttctgtgcattgtaacatgtttagcagcatctctgggctctactcactggatactggtggcatattctcagtcatgatgatcttagatatctcaagacattaaccaatgatgccgtgggggcaaacattgtccttggttgagaaacactgctttagaaaaagatgcattgtcaagaatcctgctacggaggtctggaaaacctacaatgtgtcccataaggaagtcagtgtattcgtttcctggggttgctgtcataaggtaccacacatttagcagcatgaaacaacacgggtatattgccttacagttctggagggaggtcagaggtccagcaaagattccactgtgctaccgtcaaagtgctggcagggctgtgttccttctggaagtgctccagataatccctttccttgccctttccagcttttccagacggccctcattccttggctgacagttcccagccagcaatggcatcactttgatctctgattccattgtcactcacttctctgactctcaccctcctgcctaaggaccctttggattaaactgggcctatctggccaggtgtggtgacccatgcctgtaatctcagcactttgggaggtcaaggtgggtggatcacttgaggccaggagttcgagacccgcctgggcaatgtggtgaaaccctgtmtataaaaaaaaaaaaaaaaattagccacacgtggtggctggtccccatggtcccaactacttgaggtgggaggatcacctgagctccagaggcataggttgcaataagccaagatcaaggcagtgcactctagcctgggtgacagagtgacactctgtctcaataaaataaataaatagggcccatatggataatccaggatcctctctccattgcaaggttctgaacttaatcacacctgctaagtccctttggccacgtaaggtaacattcacacgtgccacagattagaagatggacattttggggagcattattctgcccatcagtgacaggggagtgggggcagggaagtgctgagtagagaagggcagggtccctgacaagggctccaccctcgggcttgtgcccacggacgcaaatgagaacaagcatttctgtttttgcgccccaaaagttgccttttggcccaccacgccccccatcctgtacccgtgtaagcccaagaccttaagcggacacagacacaagtggctggacgttgagaggagcagaggggcacaagagcacactgacagacaccagcagacaccggcacgccatctagggcaggacgacgtggcattcggttgggggcagtcggaggagagtctgtccgctgggcagcccgactccaaggaagactaccttcccactccatccccttctggttcctcatccacctcactgagaacaacctccaccactcaataaaaccttgcacccatcctccaagcccacgtgattcgattttcccagtaccctgggacaagaactcaggatacagacagccctctgtccttgcaataagtcaagggatctaattgagccgcttgacaccagctgcctgcagacggcaaagctcaaagagtaaactgtagcacacgcccactggggcttctttgggaactgtaaacactcagccctagatgctgctgtggggttggagcccaaaaaagctccccaagacctgcttatctgcatgttccggctaggggtttgagcagcggggcaccaaagaatcgagccacacccctgtggcataatctgcaaagggaataagggaatttttcccgcttcattagtatttgggcayatgtcaaccagagggcattgagtagccacattgcaccggaactagttaagtaattacctaaactttttcctcttccctcccttcctgcctccagaaactggcagcagttgagcaagcagggaaaggaaggtgaggaaaagagattttatcggatccattctcattgctggaactggggtaaagctctgtggcccaggccttgctggagagagggagagcaccttaaaatgagatgggagataacagttttgattgtaataggactgaacctttttttaatcttttacctaaaaataatgttgttttgatttctgacatgtctagacctgaaaggttgctcttaaacgcagaagaaagctgttaaacagtaaaaccaaaggcagtgatggaaagagaaaaagttatccttcgtggtgctttgtagaatcyggttctttgaataaacctggaaccagatgattttaggggaggggatttcaaaattctatgaagccacctcatggactgtgaaggtcttcctagagagggtgagattgctgggagttgtgccagtcggtaccaggagactgagaggtggtgccttgggaagcccacggtttttttttcttttcctaggaccaccggatgtttttctgttacctagatgtttggggaaggcagcagaggaaggagataagagagaagtgtgagagaaaagtggaaagacctggactgagagccaccagccttcttgtgagagaagaatacatagataatattttaaatctgtgctggcagaaaatgctggggcatgcggccaccaaagggagagaggtacagcttgcctctctgcaatcaaacttaaaaatgcttccaatttgtaaatggatggcttgcttaaacgctaaagctgtaaccagggaactttcctgggtttcttgaggacaccaatcaaacgtctaaacccaagtttctcccctcgtcgctgggtgagccttcatcctgagtccttcacttttctgggatccaggaacatagtaggacaggttactcaaacactaaaactttgagtggaaattgttaatctaaaaccagaattacttatggctttttattacatgtgatatggttaaaaaatatatttatatataattttggttttttaaatatatatgtgtgtawatatatatatatatatatatatatatatmctttttttttttgagacaggttctagctctctcacccaggctggagtgcagtggcgtgatcacagctcgctgcaacctccgcctcctgggctcaagtgatcctcccacctcagcctcccgagtagctgggaccacaggcaccaccatgcccggctaatttttgtagagacaaggttttgccatgttgtccaggctagtctcaaactcctaagctcaagtgatctgcctttctcagcctcccyaagtgctgggatttcaggcatgagccaccgtgcccggccctatttatatataattttgaagaccattttaagaattctgtaaaccaaaaataaaattccaggccccccaacatctgaatggaccccttctcttggccaagagcattgtgaagttaacctgaaaaacgcattcaggccatgatagaaagggggagtcggacatgcctcattacatcctccttccttttggaattcaggcccaactgaccagtattaacatcaacacagaccttaagactaatagactctccatctgataggaaacatttacaatctattctctctgaagcctgctacctggaggcttacctgcatgataaaaccttggtctccacaaccccatattgtaacctagacatttctttctattgattccaggcctgtagataataactcaacctattgtccatcagaaaatttttgaatttgcctatgacctgaaagcacccccttccagttgtcccacctttctggactgagccaatatacatcttatattgattgatgtcttttttttttctttttttttttttattayactttaagttttagtgattgatgtcttttgcctccctaactgtataaaacaaagttgtagcctgtccactttgggcatatgttctcaggatctcctgagggctgtgtcatgggccacggtcactcatacttggctcggaataaatctctgcaaatattttacagagtttacctgtttaggtcatcaattaaaaagtggcaaatatattctggttgtaatttttccataaaaagagatacagtgatttgggtcttttgcttgtttttgttttttctttctttgcgggggggacggcattggggagatagaagattatggagcaccaaaaatggttgtgtgttacatgaagggaacaagatgttggaatatctgtttgaatggaatggaatattcaggataaagtgcagcaggtcatgaagataatgcaataagacataggtattttgtgcctcccacattagtatagggcctgagggaaatgcaaagctggagaactgggctcaatcctcaacagagcttcaggtccagagagaagagccacataagagactgacatggtgggtgggagggagggaagagtgataagagttaaacagaattaacctgtctctaggtcctaaataggattgaattgtgaaagctctactccaggttcactgcagatattggaagtaagacagcatttatatacttagctctgtgggtgcatgctatcttcatgccaaaaagttgctagaattatctgacaaaggaaagaacctgtgtagctgtatgttttgctcaggtggtgggcagaagtatgcaactgaagctgaattctgtctctctccatgtatttgtccctgtttatttggggacaggtgcattttacttttaaattgcatgtagtaaagtcttatcttctaaattaaagagatatgcctgtccatgtgttaggctaccaataaataaattggttgagggaaggaagttggaagagagaaaagtggaaagaaaggaaggaggtaaggaagagaaggaatgagggaaggaaagagggaggaaagaaatgaagacctccctgtatgtgtgtgtgcttctgtgcactatcacatggatttactacaagcaatggcatctgaggttatggaggaagtgaaatctgtgggggactctgaggctttgggctgtggcaggaaagcaggaagtcttctttggtgccagatctctttggaygtttgcggtggggaggaatgtgactgttcttcctccgcaagtgagggtaacaaatgtgaccatgatgatggcatagcaactctgttgcttgccagtcagctcacggtcccttgtaaggcagattacctctaaagagctgccaaatttcctttcgctgggcgcatcaatacaacaaacgccagagaaccctgtgccaccttcatttactgtctgcattgggactacttgctttatctccctccagcagcgagtcctccctcctctgttcctatatttgatgcgatcagccttatgttccatggtcgtattttttcaaagggagagagggtggatctctacatcgtgcgattctcaggagggattgtggttgctctcatttagggagtgccctttgtgctgggctgtggcttgcaaatgtgtgcattataaggtgcccggaacttggatgggtatagtgaatattaaatgtaaagagtctaggtatatactgggccttgatcaatatttatggaattcaaaatgtttaaatacttaactatttgcttttctttgttattattagtattattattagtagtagtattaccacgcctggctaatttttgtattttcagtagagatggggtttcaccatgttggccaggctggtctcgaactcctgacctcgtgatccacctgcttcagcctccaaaagtgctgggattacaggcttgagccaccatgccccgcctctttgttcttaattctgttttcatttgttctctagccaagaccccaagtctataatgatcaagagggttgttttatttttgacaagtggaaacccacatgtttctgaaaagtggagtggtggtggtggtggtggtggtagcataatctggaagacccctaaagaaggcagtgctacctgccatatttgacttgggggtcagagcgagagtctgagttggagagttgggaagctagaaaaatgaaggactaaagtaagagatattccttatttctccttttccttttccacatatcttgagaaagagaaaggtttttagttcagcagaaaatgggagatgctggggcagagataaaaatgctccccaaacatggcagggacttccttgtatttctcgttctccttgtagttaggttgagctaaaggagatgctactaatgaaatttgaaatcttagggtcagacatgtgggaatgcactgcctacccttccatcttggcagtgacacgggctcattccccccagtttccagagctgtgtccttttcattcctctttccaaatccacctccactcaagctttcaatctgtgcctgggctctggtttgaatgagccactgatatatttgcagccaccggggatctggagtgcagatgcaaatggcagtgttccctggtaagtgttggtgacaattggatctttctctgatttgcattcccaaggcctgcaggttttcagaaaatcacatcttataggcagttctggggaggggggaggtttattttcaatgtcagctacaaatgccggcccatgataattcttagaatgaaagacctctcatttgcaaaggagaggatagttagagccagaacaattcacttagcaaaaatttgggcccaaaaatatatatataggagaagggattgttggtgggtagagaggcctggagatcaagagcaagagatgagataaacacaagtttggaagccattggcttgtgaggggacctgagcacttagaatagaggagacccctcagggagagcttgtatggagagagagaaaggtgcatcctgaccccatcctgggcatttctctttgaaactcagccttgttataattcatttctaattctgatatcagcagtgagggttcatctaatctattctcatcacttcttgagcctctcagctctcactggtcctggctcttgcctggagatgattttactcaaaattctagtccaggatttagaattggtctaagtacagatgtgcatcaggaggctatttcaaaatcccagatgagctcatacataaagtaaggattaattttttattttgtgaaccaattgtgtaaaaaaaaaaaaaaacaacaatgcacattaggaaagtaattcatttaatttccatgacccagcccctcctgcctacaagcccccctcccccatcccatgcaatccacctcataggtaaaaacatattctgggcaaactgactcatttcatgtcacatttatcccactcaagtttgtccctcctgctttgagcctggattccacgtaaaggtggaaggtgatttgggctggtctccaggcagtcaccacctgcaacctattttcttctcatcacgacacctacgttcagtgtcaccttttcttctcccttgggctgcccctttcttgctcactcccatgttccaatgccagcagctctgtctttgtgctcagccatgcttgttgttcagcagcattcctcattagaatcccattatttgatggtcagagtagggtctccatggtgatacaggcacaagtgtagccagtattctgccaccgcatcttacctacttggcaggcaagctagagttggcctaaattctgcttttatcatttatgtgtttgttcttatgcttttaggaaaaaaaaatcctgaaataatggtgaaggacagcaagtatttgcctagagtgcatgctaagaagtctccatagatgtttttctttaagtatcctgaccgcttaacatattgatgaagacctcttatttccaggtcaacaatcagctgttaccaacttaagctttctaaacattttctgtgaaacaaatttttgccagtaagaaaaggaaattgggagctgccactgcttaattaatttgaagctttgataagctttgccagagagtcgcataatagaattagcaagtttcttaacaggtgagaaagcacatgagcataaacaaaaataggataagactatcatcaatggggtttatgcaccagcttaaaaagccagtttgggggacttttatgactctgaattaagatttgtgcaatataagattgtccaggataaaatattttgggcaccaaatattaagcttctgaaatagacccagaggttcttgtatgataaaaaaaaagtatgtataaggttttgatttgattttttaaataatgtgttcactacttccctttcttctgagactccatagagaaaaaaatatcataacactaaagagaagggaatgaggatggccaagagcagactggagatttcatcctatttcttggttgtggacaatcagaaaaagcatattgtagatgaagtggagtaaaggatgctcagaatatgcatgtcatgggcctctgggaatgtggtggctgatcaggctgctagaagcctggagggccttggctatcggattcctagctttgsatagcaggagcgagacattgtgcaaaaaccagaggcatcattaaaattctgtctgccatatagctgcatcattgatgctttccagtgccttccttgccactgcatacagaaccatcgaaaaccttcatattgagaattcttttctagaaaaattgaatacatttccaaggaagaactagggcttcaagtgcagatatttgcacatagattaaaccctttttttattatggcattttgaatttccaggctaatgtcagattccacacccacatacctaaaagaggagccagcctgtcaaggtggcccagttacaaaagagagcttccaatcagcctttccattcaggagaccgttctactggagaatgatacctgcttacccaaaacagcctttccttttccttcatgaattactaatcaaggatgatcagaaataggaacaaaatccacagcctgaaagagaaagaccaagctaaacaccaagagtgaattacccctgaagaaataaagatmaaagaagacaaaaaatttaagcttgtgtccttagaggaggcacagaagatattgcctccataaaataagagaaggatgctattaaaaataaacaattaagaaatgagaaggtgaaaatgtaaattagtaagtcattatggaaaacagtatggaaattcctcaacagttaaaaatagaactagccatatgatccagcaaccccactactgagtatatgtccaaaggaaatcactgagaggtatctgaactctcaatgtttattgcagcactgtttacaagagtcaagatatgggatcaacctatgtgttcaccaatgggtgaatagagaaagaaaatgtgttttatatatacacagtggaatactatttagacataaaaaataactggaatacggcctgcacagtggctcacacctgtaatcccagcactttgggcggccaaggcgggcagattgcctgaggtcaggagttcgagaccagcctggccaacatggtgaaaccctgtctctactaaaaatacaaaaattagcccggcgtagtggtgcatgcctgtgatcccagctacttgggaggctgaggtaggagaattgcttgaacccaggaggtagaggttacagtgagccgagattgygccactgcactccagcctgggcaacagtgtgagactctatctcaaaaaaaaaaaaaattgtagtactatcatttgtggcaacatgggtaaacctagagaacattattttaagtgaaataatccaggcacaaaaagacaaatactgcatgatcttaccaatatgtggaatcttaaaaagttgatctcatagaagtagagagtaggatagtggttatcagaggctggggaagatagtgagattagggggcaaatggggagagatttgtcaatgactacaaagttacagttagataggaggaattagttctggtgttctattgcacagtagggtgactatgttagttaacaatgttgtgtatttcaaaatagttagaaaggtggggcacagtggctcaagcctgtaatcccagcactttgggaggccaaggagggtggawcacctgaggtcagttcaagaccagtctgaccaacgtggtgaaaccccatctctactaaaaaaatacaaaagttagccaggcgtggtgatgcatgcctgtaatcccagctacctgggaggctgaggcaagagaattacttgaacccgggaggcagaggttgcagtgagccaagatttcaccattgcactacagcctgtgcaatagacaaaccaacaaacagacaaacaaacaaaacaaacatcaaaataggaaaattttgaatgttctcactgtaaagaaatgataattatatgaggagatagatatattaaatatcctgatttgatgattacacaatttatacatgtattaaaatatcacattatacctcataaatatgaataattgttaaatgccaattaaaaacaaagtaaaaaagacacaacaggctttcagatatttaaagtatgatttaaaattacatccaggcaatatatgattatagtaaaaacaagatgaagtcaaggtaatctctcagaattcagagcaaaactcaatcatgaaaaagataaaggaaaagatgagagacacagttgtttaacccaggaggtctaagatctgactgaaagaagttttaggtagtgaagttagagacaatggagggaaaaacattatttttttttttaaatagaagaaaaaatttcagtgccgacaaaaaacatgttattttaattggtaagcccagagttggtcttacataattttcatcaagtggaacattcactacaaatttactaagacatgttcattctcccctttctcctgaaaaaaacatcaattttgtttagtgtggaagtgtgcacaatgaaaaatcatttatcacacagagttccttgcaggggtgtccatgtgacccagctctgcctgtctgcataaaatgcattcgattttaaaaattggaggtatgactgacatactaaaaggtgtatatatttaatgtatatatcttgatgagtttgaagacaagcatatacctatgtaaaccatcaccataaacaatgccataaacataaccatcacttctaaatgtagatgcgatgccttggctgggtgcagtggcttatgtctgtaatcccagcatttgagaggccgaggtgggcagatctcttgagcccaggagtttaagaccaacctgggcaacatggcaaaaccctgtctctactaaaaatacaaaaattagccgggcgtggtggcatatccctgtagtcccagctacttgggaggctgaggcaggagaattgcttgagccaggaggtggaggctgcagtgagccaagatcatgccactgcactccaacttgggtggcagagggtgagcctgtgtggaaaaaaaaatgtgatgcctcattgtggagaagccatctgtgacaatgaacgagagagtaagcgacaagaaaagagtggtaggacaggagggatcctaggtccttcatgactgcgtggagcattttgtccagcctctagacttcatgttacattaaaaatattagtcattatatggtcactgtagctagatttctgttatatgaagttgtacaatactagtgaatcaccaaaaataaagagaagaccctaaaaacttctagagaaaaagaatgtgaaaatgtacaaatgaaaaagacacattgctttcagattaacaatttgtaacaaggtgatatggtttggctctgtgtccccaccgaaatctcatcttgaattgtagttcacataatccccatgtgtcatgggagggacctggtgggaaatgattagatcatgggggtagtttccctcatgctgttcccgtgacagtgagtgagtctcatgagctctgatgattttgtaagcgtctagcattttccctgcttgcactcattctctctcctgctgacctatgaaggggtgctttccaccgtgattataagtttccagaggtctccccagccatgtggaactgtgagttaactaaacttcttttctttataaattactcagtctcaggtatttcttcatagcagcatgagaatggactaatacacaaggaatcttagaagataatgaaatgtattttaagttcttaagggagattattttagacctaaattatatactcaacaaaactaccaatcaagaatgagggcaaaataaaaatattataaactttcaaggactgagagagtttacgttctcaggtcacttttctgagggaattacttaaggatgtgttccagtaagaaagtgagaaaataaatgaagggtaagatatgagatctagaaaatagttaatggatataattcagacattcagcgaaggaatttccaaatgtgaatcaggattagggcacaattgttgagactgaaataagaggataaagggctttgaaaacggtgctcctggagcaaaaaaagtggattacatctacttggtagtagtgtgattacaaagctgagttactatgaggagacagtaaaacatatgtgtatattttttggaggagggatccaaacaacgtaaaatawagcaactgagtagaattattacaaacccaacctcttgaatgctactgagtcaatgatggataataagaaaataaaatgcattcgattttaaaaattggaggtgtgactgacatactaaaaggtgtatatatttaatgtatatatattgatgagtttgaagacaagtatatacctatgtaaaccatcaccataaacaatgccataaacataactgtcacctctaaaagttttttccctccttttttgtgataaggatatttaacataagactttcccttttaacaagtttgaaagtagtatacaatacaggattgttaactatatgcactgtgctacacagcagatctctaagacttactcatcttgtataactgagactttgtactttttgacgcaaattttctcaattcttccttccttcagtccttagtaaccactactctactctctgcttccatgggtttgactgttttagatttctaatataagtgggatcatgtagtatttgttcttctgtgtctggcttacatcacttagcataatatcctcaagtttcatccattttgttgcctgtcataggatttccttcattataaggctgaataatattccactgagtgtgagtgtatgtgtgtggtatgcatatatacatacatacatatatatattatatatacacacacggataaatactgcattttctttatccatttatccgtcaattgacacttaggttgttttcagtattggctgttatggataatgctgcaatgaacatgagagtgcagatacttcatagagatagtgatttcatttcttttggatatatatcaagaagtaggattgctggatcatacggtagttctatttttaattttttgggatcttattccatagtgtctgtaccaatttacatttccaccaactatactttttttccatatagtgactgtagaaatttacattcccaccaacagtctacaagagtttcattttctccacatcctaccaacatttgctactttttcttttttgataacagccattctaacgtgatatatcattgttatttacattttcctgatgattagtgatgttgagcgccttttcatatgccttttggccatttggatgttttaagaaatgtatattcaaatcttttgcccatttttgaatcaggctactattttgctattgagttgtaggacttccttatgttttggatattagtcttttatcaactatatcttttgcaaatattttcttctattcaataggttgccttgtcccttttgctgattgttttcttttttgtgcagtttttaatttgatataatgtcatttgtctatttttcttttgttgcctattcttttggtgtcatatccaaaaaatcattgtcaaggctaacgtcaagaaggtttgcctttcttttttttttttttgaattttattgtttcaggtcttacatttagatctttaacctattttaagttgatttttttggtatggtgtatgataaaggtcaaattttatttactgtatgtgggtatctagttttctgacaccatttactgaagaagatactatcctttcctgattgtatattcttgcccttcttgtcaaaaataagtttactgtaaatgcgtggattcatttctgggaacttcattctgttccactggttgatatgtatgtttttatgccactgccatattgttttgatttctatagctttttaatatattttgaaatcagaaagtgtgattccttctgtttttttccttcttgctcaagactgctttggctactaggggcatcttatggttccacgtaaattttagatttttttctatttctataaaaatgccattgcaattttgatgggattacattgaatctgtagatcactttggatattgtggacattttgacaacattaattattccagtccatgaacatgaagaaatgtcttttcatttatttgtgactttttcaatttctttcatcaatgtttcaaagaataaatcgaaaggaaaattaaaaaaactactttgagacaaataaaatggaaagacagcatactaaaacttatgggatgcagtaaaagcagcaggagagaagtttacagtgataaacatctacattaaaaaaaaaatctcagattaaaaacctaaatttacccttcagggaactagaaaaagaagaacaaactaagccctaaactaagtttttactagagttaataaaaggaaagaaataataagattagagatggaataaataaaatagaaaatattttaaaacaacttaatgaaattaagagtttgttttttgaaaagataaaawtgataagataaacaaaatcctttaaaaactcttctaaaaaatagaagaagaaacagtactaaactaattttatgaggtcagcattatcctgatattaaaaccaaagacaccataagaaaagaaaactacaggccaatatccctgatgaacatacatgcaaaaatccagaacaaaatactgcaaaatgaagtcagtagcacattgaaaacaccatgatcaactgggatttattgttgggatgcgaggatagctcaacctatgcaaatcaataaatgtatacattacattaacagaatgtagaataaaagttatatcatcatcatagccaatgcagaaaaacatttgacaaaattcaacactctttcatgatgaaaactttcaacaaattatgtataaaaagaatttgccccaacataataaaggccatatatcacatgataagctcatagctcaaagctgacagctattcctgtcaagatcaaggcaaggttgcccactcttgcctctgctattcaacatagtattagaagtctttcctagagcaattaggcaagagaaagaaataaagggcatccaatttggaaaggaagaaataaaactatctctgtgtgcagatgatataatcctatatgtagaaaagtctaaagactacaaaaatctgttagaacgaacaagcaaattcagtacagttgcaagatacaaagccaatatacaaaatcagtactgtttatttgcaccaaaaatgacctatctgataatgaaattttaaaaaactgtcaaaaattatcacatcaaaaataatgaaatacttaggaataaacttataaaagaagttgaaggacttgtacacagaaaactataaaacacatttgacttttattgtggaaatattctcctttgatttgggtctatggattgtgtcattgaccttaatgggaaacagttttctatttgagttgaacaatatttagccacaatattagaaatgctatttattggttttccatatttaaatcaacttataaataaagcatagaagactgaactatagttatagaaaagcatatgacaattcagaaggaacatattgctttcagaagttataaggtggaaaagggaaggtgtttgaaggaagggtagagagctaatatactctttttataaagtgcattttatgggcattgagtataaatacttgaatagaaatgaaaacttaaaattatcacttaacaatttaaaggcaatgaaaacaagagctgaaaatagtaatacaactcaaaattttagaagaggacagggtcaatagtttgagagtaatgtaagtgacattcagattctcacttaaaaagaaaatatagaggtgggatctcgctatgttgcccaggctagtatcaaactcctggcctcaaagaatcctcccgcctcggcctcccaaaatgttgagattacaggtgtgagccacagcacccagccagaaaaagaaattcccactttttatagtgatatgtcaatgaatattatttacaaatggacaaaaaatacacatacatgtatatgtgtatgtatttggaattgtgagagtaaccaccacaaaaactaatgccagaaattgatagaaatgttgcttttggaaatgttaattggggtgagacaggagactgctgcttttcacaaaacaccttttttagcgtttaattttttcccccagaaaccagtattactttgataataataattttgaaagtttcatcattttgaaacaaccaattttgcttctgtatttttttagggagaagatttaaaaatgagtaatattattatgtttttgtaagtcttcccaatccattttttaaaaaggccttacatgagaatttgagttatgacaattttaactttctactcatcaggctatttcacaagaaaataaaacctctcaacattacgagaaagtagtagcaaacaattgtgacatgtgacatgttttcaccaaattacctgttactaaaatgattgggagctgcttgctaagaaatctcatcatttcccataaatattttctcccaggtggttttcgatggctttaatgctctacttccagctgtctgtggcaatgttttgacagttgttgacttaatgttttcagcccctgagaatgatgagacaggaaaaagcatttacaaagtacacttacctgtttcctctgcatccagtatattattcaaaatccattttgttaatgtacaaggaagcatgccattatttgaataccaaatactttatttttttaaacaacaacaaaatcctcactagggatcaaatgaaagataataatgttgtttgtctaacacacctggaacagacatgtttcttcctggaaggctgtgaaagggtgtcaacaaaatgtcttattacttgttgttagcttttaaggatggtggatctgaggaacaatggctaacacagataagtcactggtccagtgaggacccccaacaggtgtccatgtttacagactgtcttagagattagtttagaaatgggggcagttccattcacctttttccttttaggaaggtctaccttctggggccctttccactccaagtcagaagcctgatgcccagaacctacccagaattgattaaaacgatctgtagcatctgtttcttgacttgagagtttcaggattgttcttgccttttgctcttttgcttttatttatctcctcttagaagtccatggacattaaagttcagaaaatgagacccttaagaagaatcactgcaatttcctgaagagaaaaaagaaatagtgcctctatttcagaagagttccacctagtactttgcagaggggaatagagggtaaaataagttttgtttggaaaatttatcataggtcaagttctggagactggtgattcaacattagttgttaccccgatacagctgctttcaataacaggtacggccagcttgtatcagccatttgctatatatatattattttaattattgttcaggaccctcctgtgagatcagcattattatcctcctcattttatagatgagagaattaagatttgcataggttagttttttgctcaagaataaacagagtagatggcagagacttagaactttaacttgaatttaactactgttaccattccttgcttgtagacactttctgctctgtggttatttggttgttgttgctgctacttttgttgttaattcaattttctctaagattcaacctaattttcttctcagagcactttcttaattactgtttcctcagcattttgttttcagtttgtctttagtctttttttttacaggtacctctatctggccttttcaacccaactgtaggttgttactcttggtctagtgccaagtaggagaaattctttctgctaaatggctggtgatatgggagattttatgttatcacacgtataatagaaatgaaagggtcagcttgctagggtttatcattccaatgctgatggtgaattagcaacattttgtttattatatagaaacctgtttactggggctcaagagagcatttcttaaatttattgggccgcagaaatatgtcctcccttaattcaagttagcacacattgagagtactcctggctgcctgagactcaccattgcatagtgtatacaattcttgaccagatacgaaaaaaatgtttgtggctgaaacaaaacaaagttctagaaacacacaggatggcagtgggtgttgttagcattataataggtgtgactaaattctcaagatttagtagcactgatatggtttggctgtatcgccacccaaatctcatcttgaattgtagctcccacaattcccttgtgtcatgggagggacccagtgggaggtaattgaatcatggagataggtctttcccgtgctgttctcgtgatagtgaataagtctcacgagatctgatggttttataaaggtgagatcccctgcacaggctctctcttgcctgtcgccatgtaagatgtcccttgctcttccaccatgattgtgaggcctcacagccatatggaactgtgagtcaattaaacctctttcctttacaagttacccagtcttgggtatgtctttatgacaaaacagctcagattttctatgtattcatttcttgaatagattatatggtaatatcattgaaaattcagaagatacaaaatgtatacagtaaaaagtcttcttcctgcttcttgtctcccagtccataatttacatctgtggaagaaaacataaataaatatttccgggccaggcgcggtggttcacgcctgtaatcccagcactttgggaggccaaggcgggcagatcacgaggtcaggagtttgagaccagcctggccaacatggtgaaacaccatctctactgaaaatacaaaaattagccaggcgtggtagcaggtgcctgtagtcccagctacttgggaggctgaggcaggagaattgcttgaacccaggaggtggaggaggttacagtgagctgagatcatgccactgcactccagcctgggcaacagagcaagactgtctcagaaaaaaaaattcccattttctaactctattttaagaaaacaatattattaatttcttattgtattcttccagagaaaattagtgtatatgcaagcacacatgtatttaattatttttaacaacagtattgaatgcaaatgatagtatattaaatgcattgctttttttttgcgcctaataatacatttggaagccattccaaacacataaatacatttggttcctttctctttctatctttctctttcttgtgcctcttttaatattttctttctatagcttcttacactgaacctttgtattgatatcaatttgtattgatgatatcctatgattttcctattttttctattataaacaatgctgtaacatgtaacctgtgtacatatgttatcttttatgtgttcaagtatatgtattcttgtttcgctcatgtaaaattcttgagtgaatgtatgtaccaccatgattttcatagctattactaaactgtacttgaggcagtagcaattaacacttccatcatttatgagctcacctggtccctatgatcatcagcacagtgtgttttcaaactttttgatctttgttaatctgataggtgaaaaagtacatctcagagtagttcttatttctatttctcttgtagtaaatcaggctgagcatcctttaaattttttaaacaaacttctgaaagcaacttaatgaattggaaaaatcatctaaatgttatatgaaaacaaaagattacaaaaactttagtatgaacccagttttgttaaactacacacacacacacacacacacacacacacacacagacacacacgctttaaaagttgtctctgggttgaaggataatggatgatttttaattttaatttttaaataccttttcacattttataagcttttaatttcttaaaagccacctttatttcattttctctaactatcagttcatatcctttgccaatttttaacttcagtaattgttcttattgatttgtatgagctcttaatatattcagaaaattaatctttatctggaatgtgagtggcaaatattatttcccagtttcttgtttgtctttgactttgcttaggtagtttttgccatgtagtatctttttactttatgtaaccagattaaataaatcattttatgcttgttttttcacttatcatggttagaagggtcttctcaactctaaaattaactttgaaatctccaaaatttcttctaatatttaatagttccttttttaaataaaaacatgaattatttgatttatttggcctagtataagatgtgagagagacatccaaaatttttttccactttgctagctagttgttctaacataatttattgaataatccattattcctttactaataccacttttaccatatactaaattctcatttttctggatgtctactctgttttattgagtattgatttccactgtcacactattttgtgtttttcagcttcataacatgtgtgttatttcatggggttagtcctccctcattactttttcattttcagaatgtttctggccattcttgcttcattttttccagattatgtttattatctgtctaaaaaatttttggcatttgtgtcaaattacagtaaatgtagattcatttagggaaatgttgtatctgatgacattgacattttccactcaatagcatggtagcctttctcctgttcaagtcttctgtgtgtatatctgaagcatttaaaagtagtcttcatatagattgtgatatggacaggaggcagcgaaatattaggtagaaaagggcgggtccttcttgaagccccaccctcaagcctggactcacagcccaaagtgagaacatgcatttctgttttcccgcttaaatgttgcctcttccaaattaccctggcctgctccacccccgccccccacatcctgtgcccataaaaaccccaggctccactagcagcagagcatcagaggagagaagagaaaaagcagcttaacattggcaagaagcagcttgacttcagagggtcggcttgatagctggaccttggagaagagatggcctaactccagaggaagacccccttcctgctctatccacttccaagcccttcatcccactgagaaccacttttatcagcaataaaatcccctgcatttaccatgttcagtttgttcctgcgacctgattcttcctggatgcccaacaagagcttgagatacagagggctatcacactgagctgttaaacactaaagccgtacatggatagcaaagctataagagcacagtaacacatgccctctggggctccaggggtcatgggtaccccgctggatgctgctgtggggccgcaaggagttctgctcctgccggcatccagaactcctcctggtccctgcacccactcacctgcatgmctcccctcctacaaaggatttgagagctgcaggctgaataaacgagcaactccctttgtgaggcctatgaaggggtcagggaaaatttcctgtttcagtcgtgctcattttttgttaactttattgctctagtatcttattttttgttgctgtttatttttttccttccatatttcatgcttttgttatttagaataatattttagttgcttctcttgggttttttatttatataaccatctgcagataagatactccaccaggaaacttccaattttttaaaatcctttaaattaatttcacttcttctagttgtactggatacttatctagggttaacatcagttaatagggtgagggtaaacatctttgtctttttacctgaatttaatggaaataataatgttttctcattaagaatgatgctagctgttaaattagccaggcacggtggttcatgtctgtaatcccagccacttgggaggctgaggcaggagaattgcttgaacctgggagacagaggtttgcagtgagccaagactgtgccatcgcactgcactccagcctggacaacagagtgagactccgtctaaaaaaaaaaaaaagaatgatgcttgctagctattaagagatagatatattttatcatgttaggaaatcatctatttttattgtaagattttttaataattaggaatggttcttgaattttatttttcagcacttaacattattatatgatttgtctctttagtattattaatatggttaattatattgatatgttttctaatattaaaccatctttacttttatgaaataaacctgtattctagatttaaatttaatactaaatcttatttagtatttttgtataaacactgataagtgaggtgaggtttatttgtagttttctgggagacaatttttgttaggttttgatatctaaattatatttatttcacaaaacaaatttggaagcttcctttaacttttgtgctgtgaaacaatttacatagacttcatattatttgcttttaaaaagttgatagaattcccttgtgaacatctggtgccagcattatttgaggagtggctcttcacaactttctctagctcaactgtgatgattattctgcttagattttcttgaagtcaattttagtaaattatatttttctaggaacatctatcttatctacgttttcaaactctagcatagagttaaacaaaatagtttcttaaaagtactgcaatttctctgatttgtagttatttttctttcatgtcttattttgtgtatttatgccttttttctttcttgattatgtaagctaatgatgccaattttactgcctcttttcaatgaaccagttttgtatccrttttaacttttttatattttatttatcaaatcaatatttaatatgttctgatttccttagatttatttcgtaattatcctaaatgtttggtttatatttataattttttatttttataattttgttttatttttagttaacatgtagtaattgtacatattaataggacccagtgatatttgggtacatgtataccatgtgggatgatcaaatctgagtaatctgcatatctatcacttcaaacatttctttgtgttggaaacattcaaaatcctctcttctagcaatttgaaaatacacagtaaattattgttaactataagtcaccctacagtgctactctagaacttattcctctatctagatttatatatatatatatatatatatatatatatatatatatatatatatatatatttttttttttttttttctgagatggagttttgctcttttgcctaggctggagtgtagtggtgtgatcttcgctcactgcaacctctgccttctggtttcaagcgattctcctgcctcagcctcctgagtagctgggattacaggcacccaccaccacgcctggctaatttttgtatttttagtagagacagggtttcaccatgttggccaggctggtctcgaacccctgacctcgtgatccacccgcctcagcctcccaaagtgctgggattacaggcgtgagccacggcgcctggcctagatttatatttttaacaattacctctttatatcttatttactcatttaggcctttcctgactgggctgatctaacaccaccaccatgatgtgctattcattctaggttttattaccaatgctttcccactagactagaagatccatgatgacaagagccctgttcattgtatacatagcaactggaatagaatatgccatatagttggtgttcagccaatacttgttcaactaataactgaatgatcctctacttatacacgtcacaggacagaaacatgggacttactgatgagttgcatgaagtgagtaagacagaagacacatccatggtggttcctagcattctgacttcaccagtggaaataatgtggcactatttaatgagttggagaaaactgaaaaggaaatgtgtttcaaggggaaaattaagaatccaagtttgcatgttctacttttgagcgaccactcacatagatgtttcaacatagtttttatattctaaaagatattttaaaatgaatttttaaaatttggcagtcgactttttagcgctgacattcaaggatcatcggatgtttaaggaaagactcgatcacgagagaaaacaaactgaaacacatagaaaaatgaaacttggaggaggaaaaaatatagagggagtagaacatagttaaaacatgtctaatgattttttttcattgactggcaccctttctattgaatattggggatataggcagaaattggtggattagtagattcactaatgggaaaaagaggattgtccttcaaatgttgcctgacaaagactttaagggctgaaatgggtcagggagaagagaggctgaaggtttggagactgagaaaaagatgtgagatagtcattgtggggactttaatgagtgacttctctagggaaatatgggatggaaatgctcaatgaagttactcgtttgaggctgaatagcatgaatttgtaggaacatgaactcatccagttctgaaatactctcaagtaacactcagctgcttagaagcaaacacagaatgttaaatagtcatttaaatgtgggattatttcacatttagaagggtcaggaatttagaatattgtatgatttatttatataaaagctatattagggaaattctcaaacatattctgaaatagaatagtagaaagaactccacatgcctgaagccttgtttaaaaaaacattagcataagaataacccaaaccaccccgttctctactcctttgtcctatgttggattaattcaaagcaaatcacagatacagctcatttcatctgtaaatattgaagctatttttgaagggtgagtataatgattgaccagtaatccaaattgaatatgaaaggaagagaggacaggcctgatagagggacagagaatatagaggtgtcaatggattgaaagcctgtgatgtttaatttgtgatttgtttgcatttttaataaaacccaatagtgagagagccaatcaacaaaataatgtgcactatcctttctctcaaatcttttttacttaccaattctctttctaataaaaatcaatataaatcttttaaaattttaaaattagtgaatacatgttctaagtaattcaaacaatgcataaaggcataaaataaacggtaaatatttcatttattccccagatacccagtgacaccactcagaagccctctgtgaattatttttggtatatttgtccagaaactttgcatgtacatatatatacatacaaatatataagtattatgaaaaaaagaaatacagatggaatcataaaatatctccttgctttttgcactgtgtattggaaatcttttcatctcaggaagcatgcatctatctcatttaaaaaaggttaacataatattcatttcagacattcaattcccgtcattcatgaacagtgcagctgtgaagagcctcttgcacatatttttgcttatttatacaaaaccatgcttagaaaaaattcttagtaatttttaggatgaaaggtgttttatgcattattaattttgataaatagttccacattattttggttatatctttgaaagatggagacaaaatgcatttcaaacttctgctcagaaaacttcccaagttatctaaatgtgtttaaaaggcatgtggagggagaaagagagttgtcaggaactagtttcagaacattcttctattttggtggctatacaaccctgctgcacagcagaatcacctggagatcttagaaaattgtgtgagttctaacactagaaattctgacttaatagatctgagattgggtttgaacattggtattttcaaaaatcaacctagagattctaatgggtagccagtgcttagaatcactgctttaaacagagcaaggggaggtagagggctcaggtaaagaatatgacagtaccactaagattgtacccatgaagcaaaaaagaaatgatcaatttcctatataaaaagccacatcaggcgaaaagggtcagatgagggttggagaagaaaagaagagagaaaagagaggtctaggtgagggaatggcagagctggtaaggccaggtcctgtggtcttyttgggtgctggtcacagagtccactcttttgggtaaagatgaagtcgaagctgaagccgcttccaggctcttctcagcccagggttatcttgaatcagtagaattgagtggctggcagggtaggcagccatgatgatctggcacaaattattccacagactgttgatgtcaaacatgttggacaggtagataaacagagcaactgcattgaaaatgtagagaatgagaaagtagctgatagctttgatggccccyatgtgagcctccatgctggggtcgttggaccctgtggcattgcttcccatgtgtagggtgtgtctcttgagagagaggatcagcagggtggctgtcaggatgaacatgatcagaggagtcacaatccccaggttaaagaaaaaagccagaccgaccacattgatctcagacaagtatgttttctyagtggagttgraggagtggatagggaaagaattgttacaatacacagtgcagatgttgatgcagaacatgctgtgactgaaggaaataaacacggacagccacagaagccagggtatcaatccagtaattctccacctcagtttgaggaaaagggggtaggagaaattggcaatcttcacaaagtagaagaaactgagccaggcagcaaaccacaggctacaaaaatttaagaatataaaacttattttgaatgcataatatacagcgtyttcagaataaaaacttagggaggttgagctgatggtaatttctaacatcatgaggctttggagagctattctggatacactcaggaaaaccaggatcctgccacttgtggaaactgccttattttgaacccattcagctgcatgtatagccatgatgaaaccatttgcaatgataccaatgaggtattcagcaagtaaaactgctaaaattaaggtgatgagaaatggcgacaattcactttctgcaggatcgcagagtttagtcattctgagctgttgcttctctttggtgtctggaggaaaacatctccctmgcatttgatgggcagactcttgataactcccagtattgatgtcataggaggaagcaattgatgtatcatttccaaattcactgcatttgtttatttcagaattcttagctctacatctagagatgcaaatgttggaaggatttggtttctaatcctctctctatttttgaacatgttggtagtggttcaataatgaggcccagggaagcgcttgagtagactctttaaaagcagctaacatgrtrctgaggtccgtgttctttggtagcatcagttaatttgaacattggttaactgagtcatcatttaacttactttcacttgtgactgcagaaaatgattgaaaataaaaactgctacacacatacacacacacacacgcacttctcattttgtgctaagaaattttcaaatgatttatttataattactacatttaaacctcacaacaaccttatgagcatgtgcttctattacctccattttgcagatgaagaaactaaggcatacagaggttaaataacttggccaacatcacacaactagagcgtgatagaactgggattcaaacccaagtcacctggtcgcagagttcctcctcttatccaccatgttatgctacctagacctgtggattcttttgtgtgcccaagactaaatgcagggttgattccactatgacatttttttcctggtagccttttatgtccccaccctctaaagaaaaatcaataaagcaagaagacactgatttttaagagataggactctcttttcaaagtagattacttgagaggtaataaatttaattatacataaaagatcatacacacacacacacacacacacatattcacctttcattttaagcaaaactaggaaaataagagttgaaggtaaaactccctagttcctagcaaggtaagctagcgaacctgagaataaaagcaatgtcccaattcatccaattttggaatattaaaacaaaaagaaaggaaaaaagaatcacttttatcttaaggaatttttttctgattttaaaacgcaagcataggacacataatgataaaatggacttttcatttcagggtaaattaatttttatgaatgtatgtaactttaaaataatgatgaagtaataattctaataaagagaaagttggtgggtgagaagtctcagaaaatctttataacatttggtttttacttaaagccttttaaaaacaaggcaagaactcataaacgttttctggcttgattaatgattttagatgagttgttacgaattttaccatctcatttgaaaatcactattcctgaacaaatatttcccttgaatacagcgtaatagacaactgctcctctctgcttgtttctacccatttgcacaagtaggcctggagtatctcaggacctccagtttggttttaaagaggatttttcttgccactggctttcccctacttctgctgatccaggcttccaagagtgggaggagaaacaggacatggtcccttcagaggctgttgcgtctttcctcatttgatttgtttatccatgtatcccactctgagcccctagcccatgccagacacccaggaggcagtacatagatacttgctgggttgatatatggccttagtgaagaccttcagctcagagaagctctttatgagagacatgaggaggaatggcagttccacgtctcctcaaatttgaaaatctgcaggtcctatgcctaaatcaagtgtcagagcataaacagtgaggttcagtgagaacacagcagactgtagagaacatctgtgtaagaaacactggtgggtgacagaggggaacaaaggaaggggaagcagagacagagcagccagatgagaaagagctcagacagggtctggcttcacagtgtagggtgctgcagaggctgtgggcaggagctgggaccacagacatcaccaaaggcatttcagaagatgctctgcttgccacagcttatgaaagaggtgcttcctgcaatggaaagagttttgttcatggaaatttccaggggcgatctgaggggggatgaaataacctttctgggtgaaaagatgatcttttctttttcttttttttatttattatactttaagttctagggtacatgtgcacaacgtgcaggtttgttacatatgtatacatgtgccatgtggtttgctggacccattaactcgtcatttacattaggtgtatctcctaatgctttccctgccccctccccacaccccacaacaggccccggtgtgtgatgttccccttcctgtgtctaagtcttctcattgttgaattcccgcctatgagtgagaaaatgcggtgtttggttttttgttcttgcgatagtttgctgagaatgatggtttccaacttcatccatgtccctacaaaggacatgaactcatccttttttatggctgcatagtattccatggtgtatatgtgccacattttcttgatcttcttaaagtaacactgttggaccagttcctaaatggcaccttcagtttcctaaatacatcttggatgtatttgagtgggtatttctaatattaggttggtgcaaaagtaattgtggtttttgccattacttttaaaaaaaggcaaaaaccacaattgcttttacatcaacctaataattaaggaacgctcatgaagaaaactctgacccattaaggacatagggaataggttttaaaagtccagtttatttggttatatttttaacttattattgtgaaataacttttgacatagagatgagttataaagatagtacagacaattctcatacacccttcacccagcttccactaatgcttacatcttacataatcatgctacaatgatctaacgaaggaaaytggcgttgttacaatactatcagctcaatttttggcttcatttggacttttccagtttttccactaacgtcctctttttctgtttcgagacccagtccagaataccacattgtaattcatcattgtttccttcatctcttccaattcaaaacaaattcttggtctttccttttcttttatgaccttgacagttttgaagagtcctggtcaggtattttgcagtgtattctttgatttgggtttgtcttagttttctcattattagcctgggttaatggatttttgggaagagtaccacagagatgatgtgcccctctgactgcagggacccatgatgtcaatgacttttactggcgatgttaacttgatcacttagttaaggtggtatctgactggtctctcggccataaagttactcttttttttccttttgtgctctatcaattagaagtaagtcactaagtctggcccgcactcaagggagatgaattagactttacctcccagaggagaactcttaaagaatttgtggacattattttaaaaaccaacacagaaatattctgtaggagatattttgaagctatgcaaatatcttgtttttcctaaaactcttgtccactgatttgagtattcatgacggcatgctgcctgcagcaattaacattactgtggtgttataattttttgttttcctctttcctttcacctttattaattagaattcttctctaagaaaaaattattcctcctctcccatttagttacttaatcaaacatttatttgtattcttatgcactcatggatttttattttatattttgcatttcggtcacacttcaatactattgttattttttgctcaacctgctcaagctttggcaattgggaactctttcagattggttcttatgtcttttaaatatggctccattttttttttcttaagaacttcctaactttgtggcatcatgggatgttccaaactcatatttttcccaccccaacactgaaataaatcatttattcaaagagtcttaattcttttattggagaatggcatttacacaccaatatctaggtatttaactttgtaagaaactgccaaactattttctagagtagttatactattaccagcaatgtatgagagttttccagttgcttcatatctttgccagcacttggtattgtcaagtgtttttaaaaaattttagtcatttaaaaatatgtggcactatttctttgtgattttaagttgcatttccctaataacgagtgatgttgaggatctgttcatattcttatcgtgatggttagtactgagtgtcaatttgcttggattgaaggatacgaaatactgattctgggtgtgtctgtgagggtgttgccaaaggagattaatatttgagtcagtgggctgggtaaggcagacccacccttaatctggtgggcaccatctaatcagctgccagcaaatataaagcaggcagaaaaatgtgaaaagcagagactggcctagcctccaactttctcctgtgctggatgcttcctgccctcaaacatcggactccaagttcttcagttttggaattcggactggctgtccttgcttgtcagcctgcagatggcctattgtgggaccttgtgatggtgtaagctaatacttaataaactcccctttatatatatattccgtcagttctgtccctctagagaaccctgactaatacacttactgaccatcaatatgtctttgtttattcagaattttgcctattaaaaaatgagttgttatattccttatatagtctaattataagtcccttatcagctatgtgctttgcaaatattttcccccagtgcatgacttatcctttcaatctcttaatggtttttacagaatacaagttttaaattttggtaaaattcaattgatcaatttttcttttgtggattacacttttggtgtttggtcataaaactgcgccagacccaaagctatacatattttctcttgtgttttctttgagaagttttataattttagctttcatatttatgctgatgatgtactttgtagaaagtaaaaagtttcctcttcaaagtttcccttcttgttaaagaataaatcataagtgttaatagtttcttttaaagactaacttccttcagccctccttactttgtgctaatacctctttgttaagccctattctctgtagctgttagacatgcttacaggcatgtagtacattctatgtccttgtactttaaccaagatgtctgtgctagacgtgctcacaggcatgtcccagcttgcaacttatgccccttttttatttgggaatgttattagttttctaagtcttttcataagcaacttcctcttttcctttgttctctattgcctttacctatttaggaaagttttaaattattagccagttgggttcagtttagattgtgaggtctggctccagctaatggagacaggacacagtagcagggacaagctgcataagggataataattgcttccctcctttgttcaggtgtgctcttgccattgtttcatctgcaaggagcacctcttctgcagaaagtaaaattgccttgctgagaaaaagttttatctgaatactaatttttccttatagtaccgaggaataagtgttctgtttctaaataaacattttacttataacatacttagaattaatttttgtgtaaggtatgaggagtgtgtccagattgggtgtttttagtttttggtatatgaatatccaattgttccacaccatttgttgtcaaaagcatcctttctccattgaaattacttgcaactcttatcaaaaatcagtggactatatttgtgtgggtctatttcttccctgtctcttctattttatctatctgtcatctatctatctatctatctatctatctatctatctatctatctatctatctatctatctatctatctatctatctatctatctatctatcttctatctactcttttgtaaaaaacacattgtttaattattgtaactgtataacaagacttggaatcggacagtgtgaatcctccaactttattcatgcttttcagagttgttttgctgtgagtggagtctctggaaaaatgtttgagcaaattcttttcagcagtaactttggttaattttaagattgtttttctttaattttctgcagtttttctaccatgaatgcagtttggactttattattactattacttaatatgtcttgcttggtattcagaaggggctctagatgtaacattttatatatttttatatatttttttaattgaaaaactttcaacaactatatcttttttttttttttttttttgagacagagtcttgctctatcacccaggctggagtgcagtggcaggatcttgactcactgcaacctctgccttccgggttcaaatgattctcctgcctcagcctcctgagtggctgggattacaggtgcgtgccaccatgcctggctaatttttgtatttttttagtagagatggggtttcaccatgttggccaggctggtctcaaactccggacctcaggccatccacccgccttggcctcccaaagtgttgggattacaggcacgagccacagtgtctggcccagcaattgtatctttacaaactgcttctcagacttttcttccattctctttacctggaattacaattagactcagtttttcttaactgtttttgcaagtttttaatatttttgtttctgtattttatattctgaagacaactatgtaatttaccatgtgtggaaagggtacaacaataattaaaagtatataattacttacaatacaaatttattggctaaaattacttttattatttgttggtagtctgataaaatagatctattctaaaagtattctatgaaatcgttctaaaaaccacatatcctgctctctaaagcaaaataaaaagtacttctttgtattaactgaacattaaaaataatataagcagataattttttgttatatattaatgtatttttaaatttaaatttaaatttaattttattttttagacagggttttgctctgtgcccaagctggagtgcagtggtgtgatctcggctcactacaaccaccacctcttgggctcaagcggccctcccacctcagcccagtagctggcactacaggcatgcaccatcatgccgggctaatttttgtattttttgtaggaatgaggtctcactatgttacccaggctggtctcaaactcctgggctcgagcgatcttcctgccttggcctcccaaagtgctgggattacaggaataagccactatgcctggcctttattaatgtactttaatgagctttttagttatatttatttctgataccatgtcattgatattttttctgaataatgtatattttttaaaaatacctgttttgattgctcttatttttatgaaattgcctacagtattcttttaagttgcattttatggttaacacatttgaaattattgacactttaatggactcttctctgacgattgagaaaatagttctttataagttgagataactaatgtgtgctaagtaagttctgctacatggagtctattctcaactgtaacttttttaaactgaattatgtaaatattttagcttccatttggaaaacctttctttaaaatattttatgacaaaaataatcaagtaaattttctctatttatgattcttttaaaggttttactaaatctaaatcatgcaaaattctagtcttcagttttactttattataatacaggatatctatttatctaatcaaaaaataataactacaccaaaatattcctttctagaaaatgagatattctagcataatttttaaattttgaaattatatcttctccatcattaagcatgcatggcttaatttgtttagtttctttcttacttttgcagggataaatgtcgatactcagtgccttcctatttgtaagttgtgtttcaatcactgtgatttctcaaagctttagaagctgaagcatttttttgctccatttgtttaatactttgattatatatttccctctaattttccacaaaagcaatcaaaatttagagaaattgtttaccaaaacattcaatataattgtaagaaattttggttcatatacaaagtacttcttcaaagactcaaacrtatgtaaagaatgattgatgagagggaacaaaaagagagaactatgctgaagtatttttagtgttcaagatgagattcatcatacaagtttagtaggtcagttattctgcccacataaaaaattttgcaaagtttatcaatcgtagcttctgttttgattgataaagtatctctgattgcttgaatatttttaattatgtttgtaccacagaaaatttcagttgtcttcatatttcacagatgttttaatttagtaagaccctaagcttttactgtgacgctgtgctccactaaaatttktgtttatgttattaactgcaaaacaaataaaattttacctttytaaatgagtttcaatagcacatrttaaaaggtcagatatttcatcttcaacagaaataactttttttttttttgagacagagtctcactctgtcacccaggctggagtgcagtggcacaatctttgctcaatgcaacctccgcctcccaggttcaagcaattctcctgcctcagcctcctgagtagctgggattacaggcatgcaccaccatgcccagctaatttttgtatttttagtaaaggtgggatttcaccatgttggtgaggctggtcttgaactcttgacctcaggtgatccaccaaccttggcctcccaaagtgctgggattacaggcgtgagccacctcccagtcagaaataacttttaaaagctttactctcatttcatgaattggatgaacacaatctaaccattatttgaattaactgatttttctatttgaaagactctggtaaaattgatataaaactgatgtcatgtaattgggaattttttcttctatagatggattcaacatattaatagcttccaattccttttttgtacacgcacagaaaaactttggaattgaaaatgtatacttgggaattatacttctttctttcccatttagaagtcttttatttcttgcctaattgctctggctaggactttcaatactatgcttaatagaagtggtgaaagcgttcatctttgtcttgttcctgatcttagagagaaagcttttagtttttcatcttgaggatgatgttagctttgggcttgccatatatggactttattatgttgtgggacattccttctatatctagtttgttgagccttttttcatgaaaaggtgttgaaatttgtcgaatgttttttactgcatctattgcgaggctcatgtgatttttgtcctttatcctgttaagtggtatatcatatttactgatttgcatatgcaaaatcatccttgcatctcagggataaacctgacttggttattctaatgtgctgtttaattctgtttataatattttgttcagaattttaaatttattttcacagggatattggcctgtcattttctttccttgtagtgtctttgtctggctttgatataaaggtgatgctgggctcataaaataatttggaagttttcctttttccattgttttggaagagtttgtaaaagattggcattaattctttaagtgtttggcagaatttactagtgaagccatctggtcctggaattttttttgtttggagatttctttgtttggagttgtggcacacatctgtagtttctgctacttgggaagctgaggcaggaggatcccttgagcccaggagttcaaggttacagtgagctaatcttttaactttgattttttagagacaggatctcaccatgttgtctaggctggtttggaactcctgaccttgagccattctcacatcttggcctcccaaagtgctgggattacaggtatgagccaccacgcctggccaggttgggaggtttctgattactaattcaatctccttacttattattggtctgttcagattttctgttttttatgattcattcttgataggttgcatgtctctaggaatttatttctcctcatttatctaatttgttggtgtttaatgttcataagaatctcctaaatgtccttttcatttctgtagcatcagttgtaatgtttcatctttcatttccagttttatttatttgattcttccctctttatttcttacttagtttagatagcagtattggaccaaaatgaaaggtcacactctactgaaagatataaatcaaatgcatcttctgcagatatacattgatgtcattttaggcatactctttttaaagtagcaactaatatttcaagtcaatgctgaggctcccacagcaaatttggtctagggctttcaagtagtcagtgatgttattatagccattacggtagatggtaaatggcaacaaacatattgtgcaagttacatgttcatcatcaacttccttgaaaaatgaaaattcagtaattaattttcattatcatacattttgttttcttgagctcactatgccaaaagcttggttgaaaaaaaaatgtcaaataataaaataagtagttgtagatttacgccttacaaaaaatgacaaattatcatcgcaggaacattcagacctctctttatatgttctatgacaggactgctcagcctctatttcctactcacttttcctgtacagttaagctataatttctcacctttttccactgttctcatcaactagtgatctgaaggtttcataaaattctcaggttacagcaagagccttggcacagctggtgagtggggccggccctggcagcaacattgtttactttcgcattaccatctatggctggagagagagagggctgtcctgagccacttgcttaggagtgcactttatttttgcagcaagttccctggatagcacctttgaaaaagaggtattagcgtccttctatttacagaaactatagggtttttaggggagtagctaatatattactagagaagaccttcgtagaarttggagtacaaaatgaaagtgccaagttcatcctgtcatattttaacatagaagactaaaaattaaaaataggggacaaatgctaaatctagagagggcgctggagcaaaaggcatagactaatatgcttgtgggaaatttctgtagctctagcaaaattctttaacatcatattctaatttacaactattttcattattgggttcatttcacagtttattcctttkatttgtgtctttaaaaacttcagtgaatatatttttcctttgcaaaatttctaattgcttacttttcctgtttacttctttttcttttatttctgcccctttaaaaaaatttctgcccttttaagattataccattagttaaacattagcctgacattaggtttctatgttgtgtcttacagtttgggtctggtgtttcatcttgaaccagggagtctctcctttctccatagtcaccctccctgtctggcagtttcactgtgtttcagtcccttcttcctggtgctgtggtttcccagtgaagagccaagattcttgcctggagctgatattgttgttattgcagatactttgtttctatgagttacagctctttcagacaggtgtgtacatttttggtaaatatttgactcctggttatatgtagttttccttcaaaatgatgtcttttcctcttacctctcactacatttcttttttttttttgagacggagtctcgctctgtcgcccaggctggggtgcggtggcatgatcacggctcactgcaagctccacctcctgggttcacaccattctcctgcctcagcctcctgagtagcttggactacaggtgcccgccaccacacctggctaatttttttgtatttttagcagagacggggtttcacaatgttagccaggatggtctcgatctcctgacctcttgagcagcccacctcggcttcccaaagtgctgggattacgggtgtgagccaccgcgcccggcccacctctcactacatttctgaccctaacacaagactaaaattttaatgagttttacagaattttgattttcttgctaaggaccataaaaatgtatacttagctgaaatgcctacaaccaaaagaaacatatcaaatgtcgtgtaaccatttattgccactgatatctgatttgatgcaatagttttcttttttctttctttccttcctgtaggagttgctgttggggctccactgtctttccttagtaactatcattcttgaacatggtgaaacttattttagcttgtgttcctccagggacagactttaagaccaagatttgaatagaaatattttttagtttttaatttttttaatgctcagggcaatataattttttaaaaaataaaggtacattattaggccagttaccacagtggaacactgaggcttcatcctgagaggaatctctggcaagtgctgtgaaacatgtgactcagagttcccacacctctcaggcagaaaagcatgggttctccatgccaattttcccgtcactggttgaggcttgctcctcagggtttttagtggccttatccccacctacccctttagtctgcagtgtgtgggcaaaatgacctttcctatctctggtaggagtccactagcacagagaggcagatatggcaggttgaaattgctcagagggcacagggatggtaggttagggttcgagggatggacaaggcactaatgattgctccaaggcttcttactgtacacacctgcaactccaaccttggggaatctcttggagtgcaagaccatacttctactctttgtttctgtgagattgactattttagttacctcctgtaagtggaatcttgcagtatttgtacttctatgcctggcttatttcatttagcaaaatattctcctggttacaggttcactcgtgggttttttttttttttccttttttctggagatggagtctcactttgtcgcccaggctggagtgcagtggtgcaatcgtggctcactgcaacctccgcctcccagctcaagtaattctcctgcttcagcctcccgagtagctgggattacaggtgtgcactaccacgcctggctaattttttgtatttttagtagagacaaggtctcaccatattggccagcctggacttgaattcccaacctcagttgatccgcctgtcttggctttccaaaatgctgggattacaggcatgaacaacatgcctggccagtatttcctttttttttttcaaggctgaataatatcccattatgatattacatatatacgaatatatatgaacattccataatattccatatatatatatataaatttctttatgacatataaagaaattgttgagagttttattataatttctttacccatttgtccattggttgtttctatatcctaactaattattgtgaataatgctgcagtgaacatggaagtgcagtgctggtatctcttcaagattttgatttcacttttttggatacatatgcagaaatgagattgctggatcatatagtggttctatttttattttaaggaagcatcgtgctgtttttcatagcagctttaccattttaccttctcaacaacagtgtacagcattccaatatcacctcctcctccccagcacttatcttccttttttaaaatcataaccactataacaggtgtgaaatgacatttcattgtggttttgatttgcatttccctgatgattagttatgttaaacaccttttcatatgcctgttaggcatttgtatgtcttctctggagaaatagcaattcaactcttttctctattttttatttatttatttatttatttttagatggagtcttgctctgttgccaggctggagtgaagtggcgcaatctcggctcactgcaacctctgcctcccgggttcaagtgattcttctgcctcagcctcctgagtaggtggtactacaggcgcccgccaccactcccagctaattttttgctttttttttttcttcagtagagacagggtttcaccatattggccaggatggtctcaatctcttgacctcatgatccaccctcctcggcctcccaaagtgctgggattacaggagtgagccaccgcacctggcccattttgtaatttttatttatttatttacttacttattgctattgagttgtaggggtttcttatatttttcggatattaaacccttatcagacatatgatttgcaactattttctcctatcccacaggtcgcctttcagttctgttgactatttcctttgctatcgagaaatttatagtttgataaaaactctcaacaaactgggtataggaggattttttctcaacataataaaggtcatgtatgacaaacctgcagctagtattatacgcagcagtgaaaaacagaaagcttttcctctaagatcgggaacaagataaagatgccccctctcatcacttccattcaacatagtgcttgatatggtttggatttgtgtccccacctgaatctaatgttgaattagaggagggacctggtgcgaggtgaatggaccatgggtagggatttcccccttgctgttctcctgatagtgagtgagttctcacgagatctgatggcttaaaagtgtgtagctctctcctagctctctcctgccaccatgtgaagaaggtccttgcttccccttcaccttctgccatgattgtaagtttcctgagatcccccaagtcatgcttcctgtaaagtctgcagaacagtgagtcaattaaacctattttcttcataaattacccagtctcagataggtctttatagcaatgtgaaaatggattaatacagtactggaagttctaacaaggtcaattaggcaagaaaaagaaatacaaagcatgtaaatcaaatcacaaggcattcaaatgaaatcagaaaagaagaagtaaaagtatctttgctcatagatgacatgatactgtgtgtagaaaatcccaaagacacttccaaaaaacttagaatgaataaacaaattcattaaagttacaggatacaaaattcacctatgaaaatttgttgagtttctatatactaacaatgaaccacctgaaaaggaaattaagaaaacaattccgtttacaaaagcatcaaagacaataaaatagaaataaaccaaaccaagaaggtaaargacatacacacacaccaaaacattgatgaataaaactaaagaagacacaaataaatggaaaaacatcctgtgttcatggattggaagacttagtgttgttaaaatatccatactatccaaagcaatatatggattcaagctatccccattcaaccccaatggcatttttaataaaaatagagaaaatgatctaaaaatttatatggaaacacaaaagatcccaaacagccaaagtgatcttgagaaagaacaaagctgaaggtatcatacttcgtgatttcaaaatatattacaaagcttcagtaattaaaactacatgatattggcataaagatatacacatagaccaatgtaacaggatagagaacccagacataaacctactcaggtatggtcaactgatctgtgacatgggcaccaagaatacataatggataaaggatagtctcttcaacacattgtgttgagaaaattgaatgttcataggcaaaagaataaaactgaaatattattttacaccatacacaaaaatcaactcaaagtaggttaaaatacattaaagatttaaacataagacatgaaactatagaactcctagaagaaaacacagagaagaaacttcttgatataggcattaacaacaatttcttagataagacaagaaaagcacagcaacaaaaacaaaaatagacaagcagggatatattgaactaaaaaaaccttaactttggataggttggaatgaggtatctgtagtgttttattaaaacatggataattataagtaagaataattataagggttggggcactggatgactgctgtgattggttatagaaacccagaagaaggccaggtgcggtggctcacacctgcaatcccagcagtttgggaggctgaggcaggcggatcacaagatcaagagattgagaccatcctggccaacatggcaaaaccccatctctactaaaaatacaaaaatcagcggggtgtggtggcacatgcctgtagtcccagctactcaggaggctgaggcaggagaatcgcttaaacctgggaggcggaggttacggtgagccaagatcatgccactgcactccagcctggcaacagagtgagactctgtctcaaaaaaaaaaaaaaaaatgaaagaaagaaaaaaagaaacccagaagaaatgacagagtcagatatgtcaatgatcaactcaaaatatagtttcaaagtcagaaggtcttcaaggcagtttaaaaaattctcacctcttgcaattttcagtacacctacagaaaatcagtgatactaagtcaggcctaagatttcatagtaatggtggcatatttaaaaaggattgaattcacagccttagcaaagattcctgtgataaagttaggacctttgtgagractaaatgtattctagggattgggattaggagatttggatagacgcacataagaacgttgaatctccaggttccctgaatctttaaagtttgctagaaaagagcaaactttctttgcatggagaacatgcatagacctcatcwgagataatgttttaccttgttcttgaaatttgcccatgtctttcaacccattgattttagacaatcgctagggccaagtatcagtgtgaccaaagaaaggaaggactatccctgtaatggaaaggaaaagatgactcaccaaagtgctggctaaattttattaacaggaatgaggtgaagatgcctgggaatggattttgactattttgaatcatagaaaacacaataaaagattaattagaggggggcggttccaagatgactgaataggaacagctccagtctacagctcccagcatgagcaacgcagaagacaggtgatttctgcatttccaactgaggtaccgagttcatctcactggggcttttcagacagtgggtgcaggacagtgggtgcagcacactgagtgtgaggtgaagcagggcgaggcattgcctcacctgggaagtgcaaggggtcagggaattccctttcatagcctagcaaagctgtgacagatggcacctggaaaatcgggtcactctcaccctaatactacacttttcctatggtcttagcaaatggcacaccaggagattatatcccgcacctggcttggagggtcccacgcccacagaacctcgctcattgctagcacagcagtctgagattgakctgcaaggtggcagcaaggctgggggaggggtgcccgccattgctgagtcttgagtaggtaaacaaagcagctgggaagctcgaactgggtggagcccaccgcagctcaaggaggcctgcctgcctctatagactccacctctgggtgcagggcacaaccgaacaaaaggcagcagaaacctctgcatacttaaatgtccctgtctgacagctttgaagagagtagtggttctcccagcatggagtttgagatctgagaacggacagactgcctcctcaagtgggtccctgacccctgagtagcctttctgggaggcaccccccagtaggggcagaccgacacctcacatggccaagtactcctctgagacgaaaactccagaggaacgatcagacagcaacatttgctgttcagcaatattcactgttctgcagcctcccctgctgatacccaggcaaacagggtctggagtggacctccagcaaactccaacagacctgcagctgagggtcctgactgttagaaggaaaactaacaaacagaaaggacatccacaccaaaaccccatctgtacgtcaccatcatcaaagaccaaaggtagataaaaccacaaagatggggaagacacagaacagaaaaattgaaaattctaaaaatcagagcacctctcctcctccaaaggaacacagctcatcactagcaatggaacaaagctggatggagaatgactttgacgagtggagagaagaaggcatcagatgatcaaacttctctgagctaaaggaagaagttcaaaaccattgcaaaggagttaaaaactttgaaaaaagattagatgaatggctaactagaataaccaatgcagagaagtccttaaaggacctgatggagctgaaaaccatggcacgagaactacctgacaaatgcacaaccttcagtcctgattcgatcaactggaaaaaaggtatcactgattgaagatcaaattaaggaaatgaagcaagaagagaagtttagagaaaaaaagaataaaaagaaatgaacaaagcctccaagaaatatgggactatgtgaaaagaccaaatctatgtctgattggtgtacctgaaagtgatggggagaatggaaccaagttggaaaacactgtgcaggatattatccaggagaacttcctagcaaggcaggccaacattcaaattcaggaaatacagagaacactacaaagatactccctgagaagagcaactccgagacacataattgtcagattcatcaaagttgaaatgaaggaagaatgttaagagcagccagagagaaaggtcaggttacccacaaagggaagcccatcagactaacagctgatctcttggcagaaactctacaagccagaagacagcgggggccagtattcaacgttcttaaagaaaagaattttcaacccagaatttcatatccagccaaactaagcttcataagtgaagtagaaataaaatcctttacagacaagcaaatgctgagagattctgtcaccaccaggcctgccctaaaagagctcctgaaggaagcactaaacatggaaaggaacaactggtaccagccactgcaaaaacatgccaaattgtaaagaccatcaaggctaggaagaaactgcatcaactaacaggcaaaataaccagctaacatcataatgacaggatcaaattcacacataacaatattaaccttaaatgtaaatgggctaaatgccccaattaaaagacacagactggcaaattggataaagactcaagacccatcagtgtgctgtattcaggaaacccgtctcatgtgcagagacacacatgggctcaaaataaagggatggaggaaaatctaccaagcaaatggaaaacaaaaaaaggcagggttgcaatcctagtctctgacaaaacagactttaaaccaacaaagatcaaaagagacaaagaaggccattacataatggtaaagggatcagttcaagaagaagagctaactattctaaatatatatgcacccaatacaggagcacccagattcataaagcaagtccttagagacctacaaagagacttagactcccacacaataataatgggagactttaaaaccccactgtcaacattagacagatcaacgagacagaaagttaacaaggatatccaggaattgaattcacctctgcaccaagcggacctagtagacatctacagaactctccaccccaaatcaacagaatatacattcttctcagcaccacactgcacctattccaaaattgaccacatagttggaagtaaagcactcctcagcaaatgtaaaagaacagaaattataacaaactgtctctcagaccacagtgcaatcaaactagaactcaggattaagaaactcactcaaaaccgctcaactacatggaaactgaacaacctgctcctgaatgactactgggtacataacgaaatgatggcagaaataaagatgttctttgaaaccaacgagaacaaagacacaacataccagaatctctgggacacatttaaagcagtgtgtagagggaaatttatagcactaaatacccacaagagaaagcwggaaagatctaaaattgacaccctaacatcacaattaaaagaactagagaagcaagagcaaacacattcaaaagctagcagaaggcaagaaataactaagatcagagcagaactgaaggagatagagacacaaaaaacccttcaaaaaatcaatgaatccaggagctggttttttgagaagatcaacaaaattgatagaccgctagcaggactaataaagaagaaaagagagaagaatcaagtagacacaataaaaaatgataaatgggatataaccactgatcccacagaaatacaaactaccatcagagaatactataaacacctctacacaaataaactagaaaatctagaagaaatggataaattcctggacacatacaccctcccaagactaaaccaggaagaagttgaatctatgaatagatcaataacaggctctgaaattgaggcagtaattaagagcttaccaaccaaaaatagtccaggaccagatggatttacagccgaattctaccagaggtacaaggaggagctggtaccattccttttgaaactattccaatcaatagaaaacgagggaatcctccctaactcattttatgaggccagcatcatcctgataccaaagcctggcagagacaaacaaaaaaagaattttagaccaatctccctgatgaacatcgatgcaaaaatcctcaataaaatactggcaaaccgaatccagcagcacgtcaaaaagcttatccaccatgatcaagtgggcttcatccctgggatgcaaggctggttcaacatatgcaaatcaataaacataatccagcatataaacagaacccaagacaaaaaccacatgattatctcaatatatgcggaaaaggcctttgacaaaattcaatagcccttcatgctaaaaactctcaacaaattaggtattgatgggacatatctcaaaataataagagctatttatgacaaacccacagccaatatcatactgaatgggcaaaaactggaagcattccctttgaaaactggcacaagacagggatgccctctctcgccactcctattcaacatactgttggaagttctggccagggcaatcagtcaggagaaagaaataaatggtattcatttaggaagagaggaagtcaaattgtccctgtttgcagatgacatgattgtatatctagaaaaccccatcgtctcagcccaaaatctccttaagctgataagcaacttcagcaaaagtctcaggatacaaaatgaatgtacaaaaatcacaagcattcttatacaccaataacagaaaaagagagaacaaaatcatgagtgaactgccattcacagttgcttcaaagagaataaaatacccaggaatccaacttacaagggatgtgaaggacctcttcaaggagaactacaaaccactgctcactgaaataaaagaggacacaaacaaatggaagaacattccatgctcatggataggaagaatcaatatcgtgaaaatggccatactgcccaaggtaatttatagattcaatgccatccccatcaagctaccaatgactttcttcacagaattggaaaaaactactttaaagttcatatggaaccaaaaaagagcccgcatcgccaagtcaatcctaagccaaaagaacaaagctggaggcatcacactacctgacttcaaactatactacaaggctacagtaaccaaaacagcatggtactggtatcaaaacagagatacagaccaatggaacagaacagagccctcagagataataccacacatctacaactatctgatctttgacaaacttgacaaaaacaagaaatggggaaaggattccctatttaacaaatggtgctgggaaaactggctagccatatggagaaagctgaaactggatcccttccttacaccttatacaaaaattaattcaagatggattaaagacttaaatgttagacctaaaaccataaaatccctagaagaaaacctaggcaataccattcaggacataggcatgggcaaggacttcatgcctaaaacaccaaaagcaatggaaacaaaagccaaaactgacaaatgggatctaattaaactgaagagcttctgcacagcaaaagaaactaccatcagagtgaacaggcaacctacagaatgggaggaaatttttgcaatctactcatctgacaaaggrctaatatccagaatctacaaagaactcaaacaaatttacaagaaaaaaacaaacaaccccatcaaaaagtgggcaaaggatatgaacagacatttctcaaaagaagacatttatgcagccaacagacacatgaaaaaatgctcatcatcactgaccatcagagaaatgcaaatcaaaaccacaatgagataccatctcacacgagttagaatggtgatcattaaaaagtccagaaacaacaggtgctggagaggatgtggagatataggaacatttttacactgttggtgggactgtaaactagttcaaccattgtggaagacagtgtggcgattcctcagggatctagaactagaaataccatttgacccagccatcccattactgggtatatacccaaaggaatataaatcattctgctataaagacatgtgcatacgtatgtttattgtggcactactcacaatagcaaagacttggaaccaacccaagtgtccaacaatcatagactggattaagaaaatgtggcacatatacaccatggaatactatgcagctataaaaaatgatgagttcatgtcctttgtagggacatggatgaagctggaaaccatcattctcagcaaactatcgcaaggacaaaaaatcaaacaccacatgttctcacttataggtgggaattaaacaatgagaacacttggacacaggaaggggaacatcacacactggggcctgttgtggggtggggagaagggggagggatagcattaggagatatacctaatgctaaatgaccagttaatgggtgcagcacaccaacatggcacatgtatacatatgtaacaagcctgcacgttgtgcacatgtaccctagaacttaaagtataattaaaaaatacattaaaaaaagatgaattagaatttattgacacagaggctgtattagttatctattggtgcataatgaattaccacaaatgcagtgccttaaaaaacatgcacacacatttattatctttcagtttctggggtcaagaattttgggcacagattaactgggtcctctgcttcagcatttttcacaggctacaatccaggtgtttgccagggatacgttctttctgaaggcttaatgatggaagggcatgtttccaagcccacatggttgttggcagcattcagttccctgtgggttttggactgagggcctcagttccttgctagctgttggttagaggccaccttcaatttcttgccatctgggtctttccagaatggtagtttgcttcatccaacctagcaagggagagagtctattagaaggtgaaagtcgccaccttatgtaatcttatacataagcacatttcatcatctttgctgaattctatcagttggaagcaagtcgtattaatagtttcagcctaatctcaagaaggagattacagagtggcatgaacaccaggaggcagggatcattgggaatcttagaagctgcctaccacagaggcactctccctttgcccaggatttaagttcttgacaaaggatgcctggagctccttcctctggattggctttatgaagtttgggaatattgtgtgctaaggaaaattatgtggagaggctcaaactattctggcatagtactaaggaaagattcaagataattagatgtgcaagtcagaatggctgtactatataaggccagaaaaccaatcaggtggctttattacctgagaaatctcagaatatgtacacttcagtagttaagtaaggaatgtactggtgagagagcccctggaattgctgacagttttggtggtaactgtcctctctaggttggagttgggtaggcaatgcctctatgaagtagggttcctatgcagcaaagggggattataggatactgggccagtagaggcctactattgccactacagtgttggaggcaaaaggggacatagttaccgtgaccacaattccgaaagagcaaaaataggctgcaatcgcaaaatagacaaaaactacaaagcagcaaaaacaagcaaaaattacaacctggaggttttggcccacagggatatttggtaatggctaatagaccatgatgttcttaggagaaatataaatggagaggtaatattgaattgtatgacttaaatatacaaaaagttcaatattgaataagcagaaagctaatactggtaaatataaaggaaagtcacaatttttcacctactttgcagaccagagttagttttcagaagcatgacctattttatttatttatttatttatttatttatttatttatttatttgacagagtctcactctgttgcccagactagagtacagtggcatgatcttggctcactgtaacccccacctcccgggttcaagcgattctcctgcctcagccttccaagtagctgggattacagacatgtgccaccacacccgtctaacttttgtctttttagtagagatggggtttcaccatgttggccagcctggtctcgaactcctgaccttaggtgatgcacccacttcagcctcccaaagtgctgggattacaggcgtgagccaccgtgccctgccacatgacctatttattaaaggggagaytaggtccccttgaagaaggaccatgcaataacacagcatgtttctagtgtatgaaaagatccctttgatctttctccaaagagacttatggccatttactagaataacagtatctgggaatgagaaatgcccaaatcttttttcgtgatattagatatggctctcagctgagactgacaccaaaattccattatggcctcaatggtagggtagagttaatggaagccagttgataaataaatagggtagcagtctaagtccatttcacagcgagtacatttttttttctcatcctgtggtcatttctctgacacctgaatgcataactgagaagaatataatctacagatgcagaactttcatatctattccctgacttatggagcaatcactattatgattcaaaaggccaaatggaaccctgtgaaattgcatcctgcagccaagagagtaagtcacaattcctcctactggaatgatagagataagtgctactcttaaacaattaaaggatgcacatgcggtggtctgctttatagctccattatttcagcagtctgtctcacacaaaattaaatagatgaaaacagaccatggggggctactgtaaactattaaaaaagctccactgacagctgctgtgtccgatgtgatatctttacaaaaacagtcaacacagtctctggtgtttggcatgcagctattaatctgaggaatgctgtttttttcaattcccatcagaaaaaaaataagagtagtttacactcacctagatggacagtcacatacattcacagttctaccttgagactatattaactttattataatatggctcccttgatcctcctgacatccacaggatagaatactggttcatacattgatgatattgtgttagttggatccgatgagcagaaagtggcaagtactctagatatcctagcaagacacacgcacagtgaaaatatttaagggcctaccacatcagtgaagattttaaggctcagtgttgtaccttgaacaacctatcattaaaaaagaggtgcaaaactgtgcccaaaattcatgaccccagaagcttaaattttggaggcagcatttacttcacttgacaacgatatattcagttgctttataggctgactcacagataccagtttagagtggtatctagagcaaaaataaataataaataaatatgctctgcagcaagtttaaactttgatttaagctgtcctttattttggccatatcacctggcaggtcctatggaattacagaggtcatggtaggttaattatgctgagcatcgtctctagtaagtcccagggagagagatgctgggtagaccagtaggcttctgaaacaaagccatgccctctatagcagagaactttattatttatttatttatttatggctctttaaagatctagaagaccatcaactttatttgaatcatatgtcaaacacacacacacacacacacacacaaacacacacacacacacacccctacaaaacaatctgagaaatctgaacattgactggatatttgacagccttaggaatgattattaaagatgtgatcatagaattgtgattacatttttattcaacaggtttttggggaacaggtggtgtttggtgatgttaataagttatttattggtgatttctgagattttaatgcttccatcacccgagcagtgtacccgtacccaatgcatagtcttttatccctcaccccatttcccacactttctctcgagtccccaaagtccattgtatcattcttacgcctttgcgtcctcatagcttagctcctgcttatgagtgagaacacatattgtttggttttccattcctgagttacttcacttagaataatggtctccaattccatccaggttgctgaaaatgctgttatttcattccttgttatggctgagtagtattccatggtgtatatatatacacacacacacatatatatacatatatacacacatatatatacatatatatmcacacacacacacacacatatatatatgtatatataccacattttctttatccactagttgactgatgggcatttgggttggttccatgattttgcaattatgaattgtgctgctgtaaacatgcgtgtgcaagtatctttttcgtataatgacttcttttcctctgggtagatacctggtagtgggattgctggatcaaatggtagatctacttttagttccttaaggaatctccacactgttttctacagtggttgtactagtttacattcccaccagcagtgtaaaagtgagagaactattttttagaaaaggagcacatggcatggccatggattctgtagagacccaatagctgaccatgaaacatcaagtggctatggggccagaactgctcatcatgacctgtactggcagacccacaaattataaatttagtgggtacagcacaaatccatcacacartggaaatggtgcagttgaggttggactcaacctgatccagaggccctcagtaacagaagacagtggttcaaactccatatgaactacatctgcagaactaacactgctcctttagactgtacttacagcctcatggggtgttcctatgaccaggttttagaggggcaaaacaaaaatgtgattcacagataggctcaatttgttgttatgagccaatggtggactattaccacactaaaattttactcaggagtgtcctagaggagcayggcttggtgaaaatactcttggtaggcagtgctacaagcagcacaactggtcataaacaggatacctggatgcttgagcggtgggagatctcttggctctgcccggtcaggaatctggtaggaacaagaatattaatattttgcacagggatgtctgcctgaaattctattttttttaagtctatttttttgccaccagttaagaaggccatctgaatgaacctctggatgtgaacacaaagtggatctttgtgtctcatgttggtgctcataagaaagtatctgacacagaggagagagcaaacaattaggaacacaggaggactggttcaatggatgtccttagcttctccaatgcttgtttaatggctaatgaggcagtgattgatattatgcatatacccaatagtaaggattccctctcaccaaaagtgatttaggtattactgctgccgacccttcagcaacagagattaaggctgggacttcaatagggtactatgtctcaaggagatgaaccaaccattttacaaaacaatgattatattgaatctctttgaccttagaaggggcagcagtttatctttactgagaatgatatatattctagctatagatgtatctttcctgcctacagtattttggacagctctgctatctgaaggcccacagaatatctggtttctagacatgggatcccatgtaacatctttatggaccaagagaacctttttcttaaatgatacagttgccataatggacacataatcaaggaatctactgtttttctttttttataactctatcaccaggaaaccactggccttatagcatgctggaaaaatctcataaataagcggctgaggagaccacttgggggtcacaccctttagggttatggtgatgtctttcaagatgtgacacatattttgaaataatggttattaaatgtttctgtgttcttgatagctaaactgtactggcctagaaatccatggatggaaatggtctctcttaccatcattttcaattgtggaggtgctgggtcaaagggtctgtatataattaatttgactaagaaatgccagattgttctccaaatggctacacctatttatatgttcccagtagcagtgcttaatggttcccctatctcctcattctctgctgacacttggcattatctacctttctgagttttgctttactatgaggaaagacaaggacgtgaacacagggaggagtgtgtcatgattaggaacccagtacaactgaagttcagtgagtctattttttttgccaccagttaaaaagaagcaggtataatcattttaggacttctgagtagttgacctttcaggtcactggaaggggcagctggatatagttggactaacaggatagggaaacttggaatctttctcacttccacccttaattttctgtgtacccctggagacagttgattatactttctctggccattttcccttctatgtcaaatggtaagaataattgctgccttctctctctcctgttcactatggaatacatgtgtcttatatcatatctgtgaaagtttcttgtaagaccagtgctttaagaattcttgggatatctgggcagttacggaagtaagtttttggggaaaagacatagaggggatgctgagaagttgcaggaagtttatgttaccatccacccagataccctcaaactcagggatggttctcctaaaaaggagaccttctaggggtgggaagtcagagccgactttmcagtgcagggttaggatgacagtgctctccacgaatgtgtagtaaccggttgtcttgtccagttcctcattaggatggcccatatcttcatctgacataacttcagcatctcttctattgtttatatcttccggggagaggaatcagaagagtgatagaccactgggctccacaccacttcacttctggtcttctcacttaagctccacccaccgcacaccttatcccccctttcactgcctctggaactcagctcccactgcttagtcttatacacaaggcacagcagttgttgcccaatctccctgcyctcacgttgagcccctgcccacactgcctgcctgtcttgtrtctcgctcttattgcaatactctgctcctttgctttctgccacctcctgcttttccctttttactgtgacctctcctagcactccccctaatctggatacttatgttcaggcaggaagtgtcctcacttactggacggagttgttagttcccagtagaacttttgtctaccacacacacagtgtaaataaaacgactgtaagagcagctaatgcttggattggcctcaatactggttttaatctgaggagaggaatggggagaagggttagagagagtgtagatctggctgaggcagccctgggttaagcattaggcccaggtgaaggggacactcagggactattctccagctgttatactctttatacattcactgctacacttgatcataggcaacttaaaaaaaattgtcattatataccacgctcaactttatctgcattgttgtttttttattttgtttgtttgtttgtttttccttttttttgagatgggtttcactcttgttgcccaggctggagtgcaatgtcacgatctcggctcactgcaagctccacttcctggttcaagcgattctcctgcctcagcctcccaagtagctgggattacaggtgcccaccaccacgtccagttaatttttgtattttttttttagtaaagatagggtttctccaagttggccaggcgggtcctcctgccttggcctcccaaagtgctgggattacaggcataagataccacgcctggcctaactgcattgttaaaaacaatcttttcctttttttttttttttgagcctgggtctccctctgtcacctaggctagagtacagtggcatgattactccttactgcagccttgacctccagggctcaagcaatcctcccacctcggcccccactgtagttgggactataggcgcacgccattacacccagccatttttaaattttcttttgtagagatagagttttgtcatgttgcccaggctggtcttgaattcctgggctcaagcaatcctcctgcctcggccttccaaagtgctgggattataggtgtgagccaccacacccagccaacaatgttttctttggcatggcaaacaactcaaatttaaacgtttggtttagggaagtcacatgtcacatttgtttctgtttcaagaagcaggggtaaacacacctgtctgggtccagctagcatttaactcatcagcttattagtgaaatggactctttatttcagtacttgaaggagtaaaagggcaccagtgttggactgcatttaggcatcagttgcctttcatccagcctagagctgaggttctccaaattggagttagtaggaaattattttaattaactgctcactgaaccaagaggaagttatatggagattggagacattagtttgtctactctggtgtggtgaataaacagaaacaaaaacaacccaccaaacaaacaaaaacagagtttatcatctcacctgtcctgctttcctgctttgtaacatgacatttgcgagatggaagcatggatactcacctgtctccttcgtatgagctcatgagtgctttgcgaatgttagagctttcagaatgtaaagtaccatgtttattgtgcaaataaacacacttggattctgaaagcatttgactgagtagtatttagcacttatttttcttctgccaatcaaattataaaacttttagttaaacactgactgagtttctgaagacggaagaagaaatctgctgaggccagactagggaagaaaaaatatccgatgtcttcctgagacagtaccaaagaagacctctggagaaggggcttctcagaggcatttctactgtcaccatatttcgataaatgtcataagtgttaagtactatttgtatttctcttagggttcttagtaactctgcaattttcccatctgtttgcatctgctttccaaaaagcctaaagaaaccttgaaggaactggggactggtatcaaagatggcaaagcagaagggtttaggggttctgaatgctcagtgaagagagcagggaaaggaaatggaggacatgacttcaaaaaagccagttcttaggcaacytacagaatgggagaaaagttttgccatctatccgtctgacaaaggactgatatccagaatctacaaagaacttaaacaactttacaagaaaaaaacaagaaaccccataaaaaagtgggcaaaggagatgaacagacacttctcaaaagaagacaattatgcagccaacaaacatgaaaaaagctcatcatcactggtcattaaggaaatgcaaatcaaaaccgcaatgagataccatctctcaccagttagaatggtgatcattaaaaggtcaggaaacaacagatgctggaggggatgtggaaaaataggaatggttgtacagtgttggtgggagtgtaaattagttcaaccattgtggaaggcagtgtggtaattcctcaaggatctaaaactagaaataccatttggcccagcaatcccattactcggtatatgcccaaagaagtataaatcgttctactataaagacacatgtacacgtatgtctattcacaatagacttggagccaatgcaaatgaatgatattcacaatagacttggagccaacgcaaatcaatgatagactggttaaagaaaatgtggcacacatacaccatggaatactatgcagccataaaaaaggatgagttcatgtcctttgcaggaacatcgatgaagctggaaaccatcattctcagcaaactaacagaagaacagaaaaccaaacaccgcatgttctcactcataagtgggagttcaacaatgagaacacatggacacagggaggggaacatcacacaccaggccctgtcagggggaggggggctaagggacagatagcatgaggagaaatacctaatgtaggtgacaggttgatgggtgcagcaaaccaccatggcatgtgtgtaactatgtaacaaaactgcacattctgcatatgtaccccagaacataaagtatatatatatatatgtgtatgtgtgtgtgtgtgtgtgtgtgtgtatgtgtatgtatatatatagccagttcttgtgtgatggtaagtctctcaattttgagagagatcacaatgaccacatccctgaagcttctgttacatctgccacagcctgttgagctgggtctcctaggttcatcctcatcgctgcatgggctggttggggcgagtaggggtgggtgggaacatggttccaatagaagtctctgagcattgtcactcagtctaatccatctttttttttttttttttttttttttttttttttttagctttcattttaratacaggggtatatgagcagatttgttacatgggtattttgcatccaggtagtgagcatagtacccaataggtagttttttgacccattcctcccttttgccctccctccctctagcagtctgcattgtctgttttcttgtttatgtccatgggtgctcaatgtttagctactacttataagtgagaacaggcaatatttggttttctgttctttcattaatttgcttaraattatggtctccagttccatccacactgcagcaaagaaaatgattttattttttatggctgcatagtattccatggtgtctatgtgccacattttctttatccaatccaccatcaatgggcgcttagttgattccatgtctttaatattgtgaatagcatggtggtgaacatatcaagtggccatttggtgtaatggtctattttcctttcggtatgtacccagtaatgggattgctgggttgaatggtggctcaattttaagttctttgagaaatcttcaaactgcttttcaaagtggctgaaccaatttacattcccatgaaaagtgtgtaaacattcccttttctctgcagcttcactagcttctgttattttttgactttttagtagtagccattcttactggtgtaagatggtatctcattgtggttttgatttgtgtttctctgtccatctttcttttcatctgcatttggattgctttcctctcatttcttttttttcctcttcctaatctccccactgctaccctcccctcatgaattagagtcctgaccctatggttaaaagcctccactcattcatctttttcataacacaatttcttcaacttcaaaatggaattgataacatgtacattcctaacagagttgttctgaggttcaaggctaatgtacacaaaatcatgtgtaggtgaagcatttggcaagatgttaaactgtttcacatacaatcagtaatgacgaccaatgttctttattgtgatatttctcttctctttcccaccaaccttccctccaattcttcagttacctccacatatttatacctattgttatttgtaaccatgagtgttagcaaaaatatttcctctggctttacagattcagggattgtcatgctcagaaaaattatgttctgtctgtatatgccaaaagaaggagaaacccaaagtcagggaaagtgtaggacaggggtgtcccaggagggagaatggaagcaggaggacagagtgaacagaggggtgcagggagtgaggaagcacataagtcaatgctgtcactcataaggatcctctgtgcatgacttgtgcctgtgggctctgtgtgtccagccaagatgcccctatctgataggaaggggaaatggaggccagaggaaaagaggtcatattcctggtggactgatgagggcagggagccagactgagggactgcttttccttcatcatggatactcagttgaatctccaccatgttgtttgaagcaggaagtgatttggttgcatggtctactttagcctgagattctccttttgatttttcttatggaatcatccccaaatccatgaaagttcattttcttatactggtataactagtagaaggataagaaattctatgagtctgataaacatatcacaccaatgaattaaagtttaacataatgatcaacatagttcaactttgtccaactcactaagtagaggggaaactaagtagaagtttagtcaaccaaaacccagcacacacacattttgtgttactccatatatccacccccacatcctctttgcttctcttctccttagagaaacatccaggcttggcaagaaccccttcttcaccaaaatctccatggctccatttccatctgctagatactcctttctccacattctgtctgctacacgtccatgtctcctaaggacctgctggcttcattctggatcttagtactttgctcttgccaagggacagagtcccgtttcaatgttctcctttccacttaaggaactggaatctgtcatttcttttcctccgttttggcaaatcagtatagacctggagaccagctgtgtcgcatttatgcaaggacatgttgcatttaggaacaaatccaggaaaaggtggagtccaggagcatgtttctactttttccttacttagagaaacctgctcaggtcttgtaggtcccagccccagtgtatgacacagatcttaatgagatagagagcactgtttccaatgagaccaattgtatgagttagtggtcagcacaaccttgtaaccccagtaaagaccagggccatggcccctctcttgcagctcaggcatcttatccaaagctcatcccacaggtattgattaagcccacatctctgcccatgcttttcatttaggagaaaatgatgccaatgataaacttaggatagaaaaatgaattaaaatacaagtagtaataagacatgaatgcagtaacccccacaataggatctgaataggaaaagagtgagactaagagacatctttagtgagaatacccagaatgtgtcccctttggagtggtaaaataatccctaggggcaccatattgatttctgggttgggagatgtgtccccgttggaagattttctgcaacaaggagaaagtggtggcttacaattcttcctgagctatgctggtccccagcctcaggcagagaaccaggagcagggcaacaagacagggcttgaacagaatctgaagagcatgcatgctggagaaatttgatgcccagagaactgtgcacccaggcacccaaattattcttcataactacagcaagagaacattgtgacatttgggcaggccactcaaccaaaatcatcagaccttgaaacttccctaattaccaccatgaatttttttcttggagaaatgtcaacattcagctggaattttacattggaatggaatgaggaaagaattagttcagttgttttcccttgtttgccaatatcagattagaatgttcctggaacagcaggatggattctgccttaacttttctaaacagcatctttttcacttctatttcccaatacttgctctgggtctgtaggatctatgaaatgtatattcttatctttttgtcctctagatgacatggtgtcttatctttctaccaatgccagttacttcaactctaaattttactctagttgagtgaatgacttgacactaatgttcctactcagccctcctggtttgcatcttcaggtacaatgagtcttctgtaagaaatgatagccctctatagagtatagagtatgtttcatgagaattcaagcctcagaaataggaaaaaatcagatgagaagagggtagaccagatatttttggtatctatttcttaagatactgtcagtaagcaagacctttctgtgtattggcccctctaagggggcttgggtttaaattatatgtgtgggagctgcaatcctgaagcttcttaggaaaggtcctgttgtcccaggtctccatttttctagctttggttactgctcagcctgcttcctcttgctggaaattcagatgttggggcagttgtcagaatccatctttgaaggaccctgtgatcatctctagtcatctgcaggagaacatgtggtcttaagaacgtcttagaaagctaagacgactagagaacccatggaattgcccacctaacatccaagtgggagaaccatatcagatggcgaggtgaagtccaagggtggatgagttgggacagctgtgctcttacccctgtagagtctttccagagaactagagtgctgaaactaacaaggtccttgagatgccttaaggtgacagcaagaccagggagggctgcttccatccattcattttgaattttctacaagattcaccatgcattgagagggccagctcccaaataccaggtgctatgcagcaggtcttctcttacttggattactctgctatttatccctatgtttttcaaactcattaaactaatttctcttctcctttcctccctcccttccttccattcatttattacttattcaaaaatattattattattatttttgagacaaagtcatgctctgtcacctgggctagagtgcactgctgtgcctgccaccatgcctggctaatatttgtttttttagtagagacggggtttcaccatcttggccaggctggtctcaaactctggacctggtgatccactcgccccagcctcccaaagtgctgggattacaggcgtgagccaccacgcctgacctagtatttctttacatcagtgtacagttatacaataaatactattatgttctttaatttccatcacaaaatttatcatataatgttctatgactcactagtttcatttgacactgtgattgaagaaatttcaatttagtacatcagagtgccttcaatctttttaaagccatgtgtatttattcggttgtgtatatgaaccagaattaatttaagcagttttttttattggtagacactgactctttctaaacgtttacaattgcaaataagctgtaatgaataacatttttcatacataattttgcatgctcgtaggtttatctgtaggataaattcccagaattagaattgctggactaaggagaaatatacttgcaaatttgatgggttttaccagattggtctttgcagtgttatactagtttttcacacctatgagaaatgtttgaaagacctattttcccacagtctcagcaacagaaagcattattatttttatgtgtcttttttcaattaggtgaaaaacatttcagtatagtttagattttcacagttctgattaagagcgaagtcaagtatcttctcatttgctcaggtgattttttttttctttcagttagacttttggctgtgtcctctcaagttggttttagaaatttgttccaagacagaaataactgattcaaagcaatatttcaatattctttaaataaagcttactaatatggaagtgatcaattttaattgtttcaaataagattattaattatttggcctgttttaatatgttcacaacatctgtaagatttaagagtcttaaatactcataaattacattcttataaattatgcaaggaatgaagaaaaaaatgtgaaaactactgagttcacatattgtatgagttaaagtaaataatttaagtacagaattttcttgaaggttcttaatatttaaagacatttttatctgtattttcactgacataaactccagatcagcagggttttttttcagccctttgaggatatcatcgtattttttyctggctcacattgtttctgtttttcaggtcagctatcactcgtattgctaccatttgaaaataaaatggtgcacgtgatatgatgtgttaaacgtaattttctttgcatttatcctggttcaagttcaagttctttctatatttgtggtttgatgtcttttgtcagtttaggaaaattctaagtcattatatcttccaatattacttcttttccaatcattgtcgcctctccttttgagaagcttattgcaagtcttttatctcccttccaattatcccgtatgtctctaactctattttctgtgttattcatctttcttttctttgtaattaactgtgtagttcactccttggctttgtctgagttgctattaaaaaccgtttattgggttcttaattgcagttattgtgtttttcagttttagcatttctcattaatttttgggttaactttattttttataaaataaaataatgaaataatgtatagaggactactacttgaaaaatagaagccatctatgtcttaattctatcagatgatcacagtaattaatttcttacaaatccttccagaagtttcccatatatctatttctcgagtcattgaccattcacccagaaatgcaagtcatcactagttatctctccttatgattctacagtagtcattgattcattcaatattctttgcttcatctctatcacttttatgtcttggatgaataaaaattaaggttttctctctcctagtaactgttttatatttgaggttttttatttgttttcctttttcctgtattttggtgggttttttttgtttgtttgtttttgttttttttttgacagaggatcactctgtagcccaggctggagtgcagtggcatgagcttggctccctgcaacctccgcctcctgggttcaagcgattctcctgcctcagcctcccaagtagctgggactacaggtgtgagccaccgtgcccggcactgacattgttttttgtttatccgaaactcctcagtcttcttctttccaggcctctccacatacagatgctatttaatgttgctcccaacaaatgtaaacacattttattataggagttactttggaaaaacttgatttctttcataaatattccctgtcacacgcactcagtaaactttcccctgaaatggaaaatgtctggctgagagctataggaagcaaatgataatacagggtgaaactagctgttaccaattctgtagcaggactatcaaccttataaaatttaactcattatgatgtatttctcagccttaattaattcacataattaaacaaagcatttattgggcaactgttatatttgcggagcatttgaaggctttacatgttattctaaaaggatgaaaacatatcgaccaggcaatcatggcaggcatagtctcttatttggaacaaggaagagtcaaagtgcccaaagttgttgttgttgtttttccacaacctcctgagtagctagaacttcaagtgtgtgccactatacctggctgaatttgttatttttttactagttttttctttaatttttatttttctttatttcttctaaaaaaaaaaacccagaatgcatgtgcagaacgtgcaggtttgctacataggtatgcgtgtgccatggtgctttgctgcacctattgacgtgtcctctaagttctctcccctcactgaacctattgacccatcccataagttccccatctaatatggtagccactggctacatgtagccattgagtttcagaaatgaggctagcctgacttaggtgttttgtaagtataaagcacccaacagatttcaaagacttactaagaataaacgaatgtaaactatttcattaacaatttaaaaaatattaattagatcttataaatgaatttaggatatattcagctaaataaaatatgttattaacttaatttcacctgtttcccttttctttttatttaaatgtggctatcaaaattacacatgtagcttaaaatatatttcaatgaatatttcttttttttttttttttttttttgagacggagtcttgctctgtcgcccaggctggagtgcagtggcgcgatctcggctcactgcaagctccgcctcccgggttcacgccattctcctgcctcagcctcccgagtagctgggactacaggcgcccgccaccacgcccggctaattttttgtatttctagtagagacggggtttcaccgtgttagctaggatggtctcgatctcctgacctcgtgatccgcccgcctcggcctcccaaagtgctgggattacaggcgtgagccaccgggcccggccttcaatgaatatttctactgaacagtctactctaggtaatcaaaaattctaggctgggcatgggtggctcacgcttgtaatcccagcactttgggaggtagaagcaggaggatcacttgaggacaggagtttgagaccaccctaggcaacatagtgaggctccccctgcccaatctctacaaaaagtttttaaaaaaattagccaggtgaggtggtgcttgcctgtagtctcagctactctggaggctgaggtgtgaggatcacttgagcccaggaggttgtggctgcagtgagcagttatcacaccactgcactgcagcctgggtcaaagagtgagacactgtctcaaaaaacaaaacaaaacaaaacaaaatctaggtggatataggtgttcacataattcatagaggaaataaaatttgcaattttgaaatgctttctggtagacactttgcaggggcctaaaggagactgttgggaagtatgtgcaagtagtatagaagttaggagcatgggctgggtgtggtggctcacgcctgtaatcccagctctttgggaggccgaggtggatggatcacgaggtcaggagatcgagaccaacctggctaacacggtgaaaccccgtctctactaaaaatacaaaaaattagccaggtgtagtggcaggcgcctgtagtcccagctactcgggaggctgaggcaggagaatggcgtgaacctgggaggcggagcttgcagtgagccgagatcgcgccactgcactccagtctgggtgacagtgcaagactccgtctcaaaaaaaaaaaaaaaaacaaaaataaaaagaagttaggagcatgtctctccaggctacctgtgtggttcgaatcttggctctgtcacttgctggctatgtgcaaattaattaccttctcttatctcagttttcccataaataaaggtaagaataacatgtacatgtttattttctattgcctgggaacaatataagcattttaagaacaggataaaaaattcctgatttacttatgtaaaaccaagtgctgaaagcaggtaatggcacatgtaggtacttgataaatatttattgagtgaataaatatttaatgtctgttattgttttaaatagggcatgtgataaagcatgtaaataaaattattcacatttttggtacctgttaagcatataatcaattgatatggacaggagacagagaaatactgggtagaagagggctgttccctggcaaaggccccaccctcaaacctggaaacctgcggccctaaatgagaacaggcattcctgtttttgcgcctaaaaaattgccttttggcccgccatgcccccatctggtatccatataaaccctgaaccccaggctccagaaggagatgagcagatgaggagacaaatggcagaatagcgcagcagagaaggagagaagggaaggagtgtctgaatgtaaggaggagttcggctggggatggacggagaatcagccactggacagccaaactccaggggaagatcatcttcctactccattccctggccggctccccatccatcccactgagagccacctccaccacccaataaaaccctgcattcaccatccttccagttcatgtgtgacccaattcttccgggatgctggacaagaacttgggatgcagaaagctgtcacagtagccctctgcctttgcaaaaaggcagagggtccactgagctggttaacacttaaactgtccgtagacagcaaggctaaaagagcgcattttaacacactcccacttgccctcctgcacctgtccgtctgcgtgctcctcctcctctaaggggtttgagcagctgaacagatgagtgacacccctgttgcatgttctgcgagggaggtcaggtaactctcctgtttcacaatgttacaatcctaattaatataaaaaatgatcttttccaatgactgtattttccgccctggattttgattctcatttaggatcactggcctaggggatatggtcccactttcttgcccagattcactcggcctctcctgattttgctcctgtcctcttgccagatctgcttctaactcttccatgtatacttaatcctgcccaatatgaaagtgtttacctgccctgagcaagccactatttcatgctttgggctcttggtgcctgcgtcctatctactagaatgccctctgcccacttcgtgcacctgatccttgctcatattccacttctatgggctggccctctgggatgaagcccctcagggctccctctgcccctttactcctctattatgcctgagctcctcaggcagagctgcacaggaccctgatatccctgagtgtcacaatccattgaaaacaagcaacagaatagcatagaatgctactgctcatttagggggccatggactccatccctgactctgctgcatgcaacaggactcctgtcttctgggatctgagctgttgctggagggcagtgggatggagagaggtcaagcaacagggaggcttggtgcctgccctggctctgccactcctgtgccgtgaactttagggccactgcttttcctctctgtgagcatagctcctcttcccagtttcttcttctctccctcttcataccaatgggcagtgagaacccgtacaatctcctcagtaaaggttctttgaaagacaaatgttctagaaatttcaggtaatctggggttcttcaggagcagattttggagatacaacagaacatggagaagcatgttaagaagtttattttatagaccacagcagaaattccagccaagtttctttagaggaaatcacctgggtgtggcaaacagacagggcttccattattctacctttaggatttcaatagtataaaaccggttgtttttgatggggattacagcagcatcatcagggcagatgcctaattcccgaataacatcaacgacggctgcaatttgcacagttcctgaaaaagacagggacggagatcatctctcagacaccccggccatgtcctgtcttttctactcatatcaggcatctgccccctggggttcagtttccccaaatcctttgcaaatttgtctcctgtatcaactttttgcactcaatgcctctgtcttagaacctgggtgcyttccccatctgctctccccatgctcttccctccctcccttctgtccttctgccctgaggtcctggtcctgctcggttcgcagccatgtttctgtttatagtttctcctccctggtggctggtgggtagttccctccttggacaacttctgtacttactgttggtgtaaaagtcccagtagaaggtttttggattgtcgtcacataggcaggcagtatacttatagttaaatgcaccttgtagagggatgctgctaatgaggtaagttttaacctggtgaggagaaggtgggagggggaattcattgttattttggggaatgggtaagggagggaaaaataggagagggaaaagccggaggagaagagtgggggtggaggtgggcctagggcaagggggagtctactgttgtagtatcatttcaggagccaaagtctaggtcagaaggttttcccttccaatgccctcaaactcctgccttagcagtgtggagaagctcaggaggagatagggatgcaagtgaatccacagggcaaggagagctcatccagggcagctgtccagctgaggagcaggcttgccttagtcaccagccagaggtttcaggaatcgacctgcaatcacgtttactctgagacctggtgagacagcagcctggccacttgcgtgtaggagccaatgtcaggccttgttgtcagagctgtgaccaagccccatctgtgctcctctctgacttggtgacctttggtgatgagaggcctctcactctcactttcctcaggtatgaggtggaaacaattaactaccaaacctggctgttagataagcaaataacatcttgaatgtaaatttctttttaacttgagtgctttgcaattcaagatcccagattattgtatatataaatttcagtggagtcagaggattttgtccagttaacgtttaacacagcagttttatcctggggtccatagacccagagggatctgtggatagcattcagtgagtctgtggactcaggcaggggaaaaatatgcatctttattactaacctctaattgaaattcagcattccttctgttatgaatgtcatcaaggaaccacagtgccattagcagtatgtgtgattttatcacaaggagaaaagtagatatgtacatatcattgcacggatccagaggtccgaaatacagcctgaatgtactaccttgaatgtatggcagttatcagactggctcatggkcacgactgaggcccagtgccattctgcccacctcctgcagcttgctcagctacctggcaactcagcatcaagtagccgttcagacctaaacagtaaattcaggtgttctcacccttggagttttactcagaatgccttggagaatcctggcgtttctttggagaagactacctgtgccttgtttcccttttttttttttttctaagagacagagtctcactctgttgcccaggctggagtgcaatggtgcgaacgtggctcactgcaacctccgcctcccaggttcaagtgattcttctgcctcagcctcctgagtagctgggattacaggtgcgtgctaccagccctggctaatttttgtatttttagtagagacagggtttcaccatgttggccaagctggtctcgaactcctgacctcaggtgatctgcccactttggcctcccaaagtgctgggattacaggcacaagccactgtgcccggccttgtttacctttctgttacattagcaacaacatatcgtcatgaatcagaatttacaccacttgtacaataaaagatcagaatccrttgcatgcctagcatggcacgtgggacgtgttgccaaagaccagtgcagtttaatgtacttcttcaagctaagtaacaacatccatcacacagataatgtgttcatagaataaaattcaactcttctatattttaaatgtattgctttcccagctaatgtgtgcataaagaaacacataccttactgcatcacaaatttattttttacaagttagtcactgttactcaatgtggtagtttctctctgtaatccaatgcactttatacatttagaagcaattttctgataaatgtttcataaacttcatgaaaccaacgaaatggcctgtagcacaaaaatgtttaagcattgtttttgccacaagtttccttcagctttaaaggattatgcaatctttatattcaaatatacgattgtaggtatattctattctaattctaaaataaataaatatgagtctaaacctcactttttcaaaaattcagttacagaaaacattataaatgataaaaaatgaggattagatggtaagaattttatagttatataaatatattttaataaaaatttaaaaatagttatactttgaaaaatgaagccacaaataaaaatttgttgactagaattaacaaaatttcctttcctgtaaattatttctagtttgcaaagtcagttagtctaaagatttcttattcttttagttgtgcttaggtgggttttgaaaagattgctttattttagagtactagcatgattcttaaaagcatacttttattaatcacaaaagcacaaaattatgtcacatgtaattttattgattcaaacatatcttattatacctaccactaccattaactattaccaccagaaaccaccattttcacaaaaattttatgtacacattatgtacatgttcttattctcattctcacctgtgtttgtgataaacaaaatacagagttgaaaaattatgattcagccttgctcctaccccaaattagtgtacatgtctcagattcttggactgaaaatagaaaaatttgacaaagcagctgtgatattctttgctcattgaccaggaatttttctttacaggtgtggggatatttctagaatgcagttgactgaatagcaatcttcatgttctcaatgttgttttacatgtaatcattgtccttaagtctcatttgaattaggaaacttatgttgtaaggaaatacttgtgctgcctgatagaaggtgtccttcatgaagggtctggggagggagtaggggagatgggagatgcatgggtcttggccctagaacaaaggtagtgggggcagtttgcatgcttgtgacatctgagatcaatgactaggaaaaggacacacaaccagtgtcccagggaagagtcactgtggattaataactgcataagtctatttgacttctggcccttggcagctagacaggagggataatgctctaatcccaagctgctcaaaaatgtgatcctttgggcacagccttggtgtaccttgggcgtctgttaaaatccagaagttctaatctctccccagacctgctgaatgaaactctgaattttaacaagatccccgagtgagttttagacacattaccatttgaaaacctctgaccttgttcagagattggacttctgaacgtggggaaaaggaggagatgattacgagctccttgtcagggtggggaggctggaacaagagtccacttctggtgacccagagcaaaggagcagaagaaggcaagaggacagtagagtcgctcagtgcttactggagaggaggagtcatatcctgcatgtcctcttctgcccacccacctcaacctatggtgtggagttgctgctttctcttctgagaactcccctccctccatcctaaactaaacatgctcaggaccttggaaggactctaactgcttctctactagctcttacacttttttctttttccctctttctcacttcctattccttcttcctttccttcttatttatcctagacttctctggattcgaacttcttcatctggaaaatgagaagtcatctgtcccaagctcccacagttgttctgagtctcaagtagcataacataagtgagaatgtttcattaagtacactgtacattattaaagtgagagattaaattatgtttataatcaaggagttgaattatcttktgaagtcacgcccccagtcctctacttaccaccatgcattctttcaattctgtttgaactgcaagcactgcagtgacttcgtcatttggacgtactgacttgggaatgtcaaaattctttattatgatcttccgactgattgtgggaagagagaatcagaacaccargatcagagaccaatctttgagtgaggggggagccatgaacagggcaaggggcacaggatgggcaagggagggaaattatggggcttggatcaattgttcagcattggaatcccctggaattttcatgtgttgattggattggtaacttcacacagatttaattttgtttaataaaacaactaggacactttaagattccttaaagaactaaaagtagaactaccatttgatccagcaatcccactactgggtatctacccagaggaaaagaagtcattatttagaaaagatacttgcacatgcatgtttatagtagcacaattcacaattgcaaaatcatggaaccaacccaaatgcccatcaatgaacgagcatcttcttcccttccattgaccaaaaacaagtttttaaaaagaaaaaatgtacaataccacatgccacttyctgataacatcctacaggctctggtggttgtctactgagtaggagggctcaagtcattattaggagaaaattttctagcaacagaatcacattaaaccagcaaacctcttgatcagggaaatgcaaatcaaaaccacaatgcgataccaccttactcctgcaagaatggccrtaatcaaaaaatcataaaacagtagatgttggcgtggatgcagtgatcaggggacacttctatactgctgacgggaatgtaaactgctacaaccactatgkaaaacagtgtggagattccttaaagaactaaaaatagaaccaccatttgatccagcaatcccactactgggtatctacccagaggaaaagaagtcattattcaaaaaagatacttgcacacacatgtttatagcagcacaattcacaattataaaactgtggaaccaacccaaatgcccatcaatcaacgagtggataaagaaactgtggtatatatatatatatatatatatatatatatatatatatatatgatggaatactactactcagccataataaggaatgaattaacagcatttgcagtgacctgtatgagattggagactattattctaagtgaagtaactcagtaatggaaaaccaaacatcgtatgttctcactgatatgtgggagctaagctttgaggactcaaaagcataagaatgatacaatggactttggggacttgcggggaagagtgggagaggggtgagggctaaaagactacaaatatggtgcagtgtatactgctcgggtgatgggtgcaccaaaatctcatcaccactaaagaacttactcatgtaaccaaataccacttgtaccccagtaacttatggaaaaataaaataaaataataaaaaattttaaaaacccagcaaacatctcaatgcactggaggtatttgtaggagcatctttgaagatcctccttctgtggtccccaggtagggtttaggaatttgtatttatttagctccttaggaaatttggacatatggccatgtttgggaactttagatactactctacatttagaccatacactgcaatctgaaaaggaaaggaaatggagacaaataaaatggtcaaatgttcttcttcagtcaatgaggactgggttcggggccaggagagttattttctygtccctagaaactcccggctacggacctttgttattgtgtgggacagaagggaattgagattcttagcccacagtgtctcacagccccattttcttggggcaaagcatcttagagagattctattttttggtgccaactgctgtagtgcccagtgcacaggaaaagggtataaatacctaagcaacttcaaaatctctcccatttgtatatgagtttcagattgataggatgaccagcttagttcgagtgactaaccatctcagtttacccaggactgaggtcttttccagaatgggttgtggaggtggcgggggagggcagagttgcagtgctacaaccaggaaagttctgggcaaatcaggatggatggttgataacctaattagcatagcttatttgaataccttgctgcccttcagggctaagtggactgtcatctggcgggaatggggtgggatctgaacctgtccccatgcagggtttcttgggacacttgcctccattacattagcttgtcaaaaccctgaacagtttcctccaggacaggatatctgaccatgccatagagagtacctccaagatcacaacccagaaacccagcattataaaccctactgctatagagaaaactccctagattgggtatcgctgctttctcccagacccttggctccattttctactttattttacttgctccaatttttctgcttccttcacacatgtgttctcaataagttgacttctgaacctgtgctctcaggtcccagtatacgtgagagcaagaggtcatcatattcatcttcagacttcaggttaggaagaatgtctaagctgccagtctagctcaatctcagaccacagggcagtggccagggcctctggtcctttagccagtcctgccaaagctgccctaagctgccattggaattcacagacctgttatgcttctcttctaggaggcaaggtgtgagaaggtaaagtttactgagcagaaatctgaacaaaggtataaattatgaacaagatgtggatcagcatgttagatgaagactaactactaattacagcctgtaggtacatttggagctttatttccactggcaatgcagaaacacccagcaaaaatgtgagaggagttggtggggcttcctaagaggacaagaagtggaacctggcaggagatccatgggagctcctgggactagagttctgggaagttgaaagaaattctcagaaagagatatgtaatttccagactgggagaggagccctccctgcaattttttttgtggggaggagaagggcatggctcacgtgttgtcctgagctttgttggcccccaactgcaggcagagaaccaggagcagggtggcagggctggccctgaacaggagctggagcaagcgcatgctggagaaaacagaaggcaatgtgtcccagagaagtggtgtcccaggtgcccagcacatttcttatatacagattgatcaaggaagtgcaagagctgccagggagatccatgaggtgaatcacccattcaycctccccactcgtgatctttccttgttgacccaaagtttgtttttctaagaaaaaatcaacactcagctagaatgtcagcgtttgagagaggagtcagattgttcttccttattttttcagcatcagagtttctcaaaatggctgggacctcaaaagatacaccagtttttcccgagtttacagattcagttttcttttccctcctaatttgcctgtctgaagtgctatgtgtagtcttagcttcagtcactgctcccctggtctctgaaagcagagaacacagctgtggtggcaggtttcagaccagagacatagaacatctttgcttgatcaaattatagtgagttcaagaygcaatgctattcaaaacatttcttggagggctaggatgatcaggacttccctagcagtcactacccatcatgaggtggaagagctagagaagacctgagctgctctacatgatggggaagtgagttcaagacactgggtgatgtaaagatgtttattgtcattgagtccttcttaatttcaggtgtkgttgcaatatactgcagatgtccaagatccccagctgccccacaatccccaaggcagggtgatattttaattctagacaattcctataaatagctggcacccccaaatcagacttcttggcaccaaagagctggcttattttcttattgacatggccactttcttacacttgtctcatgcgtaagccacacaggaagaaccacagtggaaaggattccttctgtgagaatggagcccacattatgtccagtagatacccaggttgtagaattcctctccttgggatgatggggagacttgctcttgctgacactggcattgtgttatttctccttatgaaattaaatctgctccttaacctatgacttacaatactatgggatttgtttctatcatttgcatggcacacagctgcccaggaagagcctctctggcaacagagtgaaaatcagagttctaggagttaccgcctctgtatgttgctttagccaggattcagagctaaagtgtaagtgtgtgcttctgctttctggatgtatctctcaaaattgctctgtctgtttattcagctcctggatctacyttctcttttctttgaattggacaccattcatgtcattgctcactcagaacttcagctgttctcatgatcacatgctttcttccctgtttatgtcctatccactcaagaacactgcttgtgagggtcacaatgaccttcctttgtaagccttttcccacaattaaattgtctttacacctggtccttctcacttgcataatttccatttgaagcacatcctagctacactgaccaaggcaggcataaggcagaagaatctaggaagtgtctgtgtgggaaaatgcaggaaaagttctttgcttggctctttgaaggcatagccctgtccttgaggatgcaactccagcactcccaaaaggcagtgtccagaggaaggcagatgacgatgggttaagagcatctattgaaggtaatgaggctgttcttctgtgagctagcaggaaactgcaatacctacaatgtacaggacaatcttttttttttgagacagaatctcactcatccaggctggagtgcagtgrcatgatctcagctcactgcagcctccacctcccgggttcaggaaattctcatgcctcagccacccgagtagtggggattataggcaggtgccaccatacccggctaatttttgtatttttggtagagatggggtttcaccatgttggccargctgatcttacattcctgacctcaagtgatccacctgcctcggcctcccaaattgctgggattacaggtgtgagccactgtgcctggcctaggacaagtcttattcaggccatgactgctgtgatggttacttttatttgttagcttagctaggcatggtgcccactttttggaaaaacaacagtttagaagttgctgtgaagttgttgtttgtttgtttgttttaaatgtgattaacatttaaatcagtaaaatttgagtaaaacagattacctccataatatgggtcagactcattggatcagttgaaagtcttaagagaaaagcttgaggtcccttgaggaagaagattagggagaaaaagaaaccataattattatgccataaagaatgaacaagtctaggtttaagaaatcagataaaggttgataaaatcagattgtaaacaactcaggaagcttacagaagagaatgtgtatagtcccatagggaaagagttagaatataggtgaggcttgccacaggctaagtttacaaagagaaagataatcttagtcctgacagggctcatgagaagaagataaggagtggacagagagggagttatagacaccaacacacatgaagcatatgctgtgtgcattacactgctctaaacattttaacatatattagctcaatctttattacaaccctgtgaaggtggttgccatttttattccattttacaagaggagaaacagagacccaggagataaatatctaacccagaccatatagccagtatatggcagagtcaactttgcaagcaggttttgtggaatctgagttttgatttacagtatctgagaacctctttttgaaatagaatccaaacttacaaatgtaaactacaggtacaggatcttggaggaggcacccataagtaggaagccctgaggcttcatgccattaacttaatggcgaatacacctttgggtggggccagaatttccacrctggcagtctggccctggaacatgaccctttaaccactgcactgcctactggcgagaacaagttgcaaagttagtaactggcagagttaggggttcaaaatcaagtagtctgwtaccagagtttatgtccttaaacacttgtctagtctatttattgatgtagcaacagtttaaagttgagaaaaggaaactcacagaggttttaataagttgttcaagtcacagagccaacaaataacaaaggtattgaagtttggcttggccatatgactaagccaaaccattggaacccagatagaagtgaatccggagttggcacttagagtgactactctatatttcctcttacttaataaaagcataattggcacaagacttgtagaagggcatctaatgcatactgaagatgtaagatgtaatgagttgtttcttagaggaggttatatccaagcaaaatctctcagaggtgagagaagctggagtgtgactcttttcttagaaactctgtcatctttagtgtcatttctttctttcttcctttttttttttttttttttttggtggagttgcactcttgtcactcaggctggagtgcagtggcgcaatctcggctcaccgcaacctccacctcttaagttcaagtgattctcctgtctcagcctcctgagtaactgggattacaggtgcctgccaccacacccagctaattatttttatttttagtagagacggggtttcaccatgttgtccaggctggtctcaaactcctgacctcaggtgatccacccccccttggcctcccaaagggctgggattacaggcgtgagccacaatgcctggcctttagtgtcatttctaaggtcaccctggtgatgtaggggccaagggaaaactttttttctgccttctgaagtttcactgagaaataaactgacaaaaagtagattaataggagaaatggcatacaagtttattaacgtgcatgggagagaatgatgacctccaactcctcagtgggagtacagaagctcatgtaccatcttgaggttacaaaagaatgaggtcttggagcatggccaaaaccaggttatggtagtaaatcaggttacagtggtgctacaggttatgggaggggaaaagaggaagcctggctagcaaaggtggtcttgctattgtcgaccaaaagagttaaactctgtaaaatattttaggagatttattctaagccatatatgagtgatcatggcctgtgacacagccctcaggaggtcctgagaacatgtgcccaaggaggtgggggtacagcttggtttatatattttaagtgaggcatgagacatccatcaaatacatttaagaaagacattggtttggttcagaaaggtgggacaactcaaagggcaggggcggggggaggggtctaggctataggtaaatttaaacattttctgtttgacaattagttgagtttatctgaagacctggggtcaatagaaagaaaatgttcaggttaagataaaggattgtggagatcaagttttactgtgcagaagaagctctcagatagcagacttcagagatagcaggtggtaaaatgtttcttatcggacttaaaagggtgcctggctcataggtgattatctcctggatctggaaaggaaggaaggaaaagaaaggagtaaggggattctctatagaatgtggatttttcccacaagagactttgcagggcaatttcaaggcatggcaaggaaatgtatttgggggtaaaacattttgattttcttccttgttatgccagagtcagattggaaagtaagtcaccatatacagggttaaaataaaacccatctgatgagcatttatggtctccagaccccttagataggaatttggccaagattaaaacaaacaaatacacacacacaaaaacagagcttagtcctcactatgcaggtgaaatctcacagatagtagccctcagagagaataggtaaatgtttctttcagacctttaaaggtatcagactctcagttaatctttcctagatctgcaagggaggacctcaggaaaagcctgttgcatcaatgcagattctctagagacacaaatctccccacaaaagacagctttgcagcactgcttctgtttgcagatcctctaacagccatctcaaagtatgtcaaaggagtatatttttgggtgaaatagttttgttttcttcaggtattagtattcagcttttaagaggtgaaagagagaatggagaattatggagtgttttattttttttttaatgggcaagatttggaagtggcttccaaatcatagaatgtcattcattctttgtccccgttgccacagcttagtcctgtagccaaatcaaactgcaggagagattgggaaatttagcatacctgtatgcttaggaggaaagggaaacagatttggtaagttgctgtgttcctttacatatgtggtatgtgtatctgtgttttttatagagaatgtcatcctaaaataatcaaaaacatcagagtgtagttgaaagagagtttattcaagcacagtgcttgaggatgtacccaccagcaagcacagattccaaagaatggaagtcagtgttccaaagtataaaagtttcagatcatttatacagataaagttcagggaagtttagcagaatttcaacacctttctatggaaggcttaatgcatagttacaatgatctgattagttgaggtgttttttttctttctggaaagatatctctaacattccacactgaagatgtaacyctcagggggtctgttttgaggatgcaatctggtctgagttaggtacagaacaatagaggaagcagttaatctagaataaatatcagtgattggaaggaggaagtctgttctctggtctttcttagtcatttacagaaccagaacaatgaggaagacggttaagctgtaatctaagaagcagaattgcaaaacatgctacatgactcagatcacagtagcagctctctcaaagtttaaggagtttgcagtgttctaacagattttaaattttattcattttcacaaaaatatcaaaatgttttccaaagttgtggtgccattttatacactgcacaacagtttcccaatatttaatattgtcaatacttttaatcttggcttttctggtggatatgtagtggagcttgttgtgatttactttgaatgtttgtgattattagtggtatttagcctttttatatgtcatctggatattatatattctcttttgtgaggtgcctattcaagcctttgcttgtttttcaattgtaactgcctgagaggttctttctgcctgctgcacaaagaaagaccatggcattgcagtaaagaaagtttaatagacctgagactggccacaccacgtgggacatggaagtagtactcaaatcaatctcctccaagctcatagttaagaggattttttcaaagccagtttagggaaagggtggcagtggccaggtaatggatgcttgctgatgattggttgggttggaggtgaaatcatatgggttgaagctgtccttgtaaacacccaaggggttcaccttgcctgctgcctagacaaagtgccaattcatcaagacaggacttgcaatagagaaagagtaattcatgcagagcaggctgtatgggagactggagttttattattactcaaatcagtctcacaagataatttcttatcttgtggctaatgttagtcctacaaaggcaatcttgtcccccagcaagaaggtctgctttgggaaagggctgtctgtgttttaaactataaactaagtttctcccaaagttagtttcagaaattctccttgttgtatctgaaaatatgccattccagtgaaagccttgaataggcagtgtctccaattgtgtcctgctacaaagaaaaacagattcttattgaactcatgaaaataacaatattgccatgaaataataatgttcttgaatagcttctaaattctggagaaatcaggtagagagaaaggtaaatgtctcaatttgctcacgaaagtttactttacctattgctataagccatgaagagctcaaaagaaaaaaaagtttttaggactttggaaaacaaaacaaaaagattttacaatgttttaagcaaaaagaagtaaaaattatttcagtccttccttagttcagttccatggaattaattctttttctgctcgatattggcctagcaatcttcataaatacatcagttgtttttatgagagttctggaagtattttttacctagtccaatggtatgatctccaaagttatcagaaacctgtattcaagagcacttgggccaggcacgatggcttatgcctgtaatctcaatcacttttgaccacagaagatgactttcataaacattttaaacctcttataattttttccattctctttcttttcctgaattcctatatccattcactttatctcattgttcttcttttatttcttcaatttagtacaacttttaaataacctctaacctaggcaaaatcgcttttcctttaacaaaaaacatatcctcatatccatcttataaccatcctyaccaaaaaaaaatcttatgtgttttttgtacattctgtgtatagaattgttatccttcttatccctaattctagttaccatgtattaattagaattttaactcctagtaaccttaattcatagtgaaaacctaagaagtaagcaatttttaagtgtcagtcacataccaacggtttatgaatatgaatttttataatatttagaaacataggctttctaatggaacattctttaaaaatgtagaacagggccaggcgcggtggctcgtgcctgtaatcccagcactttgggaggctgaggcaggatgatcatgagttcaggaaatcaagaccctcctggctaacatggtgaaaccccgtctctactaaaaatacaaaaaattagccgggcattgtggcggacacctgtagtcccagctactcgggatgctgaggcaggagaatggcatgaacccaggaggcagagcttgcagtgagtcgagattgcaccactgtactccagcctgggcgacagagctagactccatctcaaaaaaaaaaaaatgttgtgggaagtcagggactccaaacagagggactggctggagccacggcagaggaacataaactgtgaagatttcatggacatttatcagttcccaaaattaatactcttaaaatttcttatgcctgtctttactttaatctcttaatcctgttatcttcataagctgagaatgtatgtcacctcaggacygctgttgtacaaattgattgtaaaacatgtgtgtttgaacaatatgaaatcagtgcaccttgaaaacgaacagataacagtgattttagggaacaagggaagacaaccaaagatctgactgcctgcagggtcgggcagaatagagccatatttttcttcttgcagagagcctataaatggacgtgcgagtaggagagatatcgctgaattcttttcccagcaaggaatattaataattaatacaatggggaaggaatgcattcctgggggaggtctataaacggctgctctgggagtgtctgtcttatgtggttgggataagggctgaaatacgccctggtctcctgcagtaccctcaggcttattagggtggggaaaagatcctgccctggtaaatttgaggtcagactgtttctctgctcttgatccctgttttttgttgtttaagatgtttatcaagacaatacgtgcacagccgaacgtagaccctcctcagtaattctttttttttttttttttttgagacatggtctcgctctgtcacccaggctggagtgcagtggtgtgatcttggctcactgcaagctccgcctcccgggttcacgccattctcctgcctcagcctcccgagtagctgggactacaggcgcccaccaccatgcctggctaattttttttgtatttttagtagagacggggtttcactgtgttaaccaggatggtcttgatctcctgacctcgtgatacacctgccttggcctcccaaagtggtaggattacaggcgtgtgccaccacacccggcccagtaattctaattttgccctttgccttgtgatctttgctttgacctttgccttgtgatctttattgccctttaaagcatgtgatctttgtgacctactccctgttcatacaccccctccccttttaaagtccttaataaaaacctgctggttttgtggctcaggggacatcatggacctaccgatatgtgaggtcacccccagaggcccagctgtaaaattcctcctttgtactctttctctttatttctcagactggccgacagttagggaaaatagaaaggacctatgttgaaatattgggggctggttcccccgataaaaatgtaaaacaggacatttttactaagaaatataaatatcttttgtttctctgaaataagaagtcaaaagtatttaagcttcaactcatagtcattaatgtcttagaattgtatcttatttagagataatttagatattcaatgaatatccatcctttaatttagcatagcaaattttgagggtatagttaacaaaaagattttaaaaacctttaaaaatgtttgtattagtcagggttctctagagggacagaactaataggatacatgagtttattaagtattaactcacaggatcacaaggtcccacaataggccgtctggaagctgaggagcaaggaaagccagcctgagtcccaaaactgaagaatatggagtctgatgtttgagggcaggaagggtccagcttgggagaaacatgtaggctgggaggctaggccagtgcagtgttttgttttgttttctttttttttgaggtggagtctcactcttgtcacccaggctggagtgcagtggtgcgatctcggctcacagcaatctccacctcccgggttcaagtgattctcctgcctcagcctcctgagtagctgggattacaggtgcctgccaccacatctggctaattttggtatttttagtagagacaaggtttcaccatgttggctaggctggtctcgaactcctgacctcaggtgttccacctgccttgacctcccaaagtgctggggttacaggcgtgaaccactgcacctggtcccagtcttgtcattttacgttttcctgtctgctttatattctagcagctgattttgatggtgctcacccagattaagggtgggtctgcctttcccagcccactgactcaaatgttagtctcctttggcaacaccctcaaagacacacccaggatcaataatttgcatttttcagtcctatcaagttgacactcagaattaaccatcacaacctttttaagtaagcatattataaaacttaataggtattaatagttcatttatgaactcatcccatttacatctatttaatttattcactcttaacaattatgtttggaaaagtttataagacataggacacatttggccatcatctcaagttaaattttctattaactatttttatattactatatgttaggcaagtatcctaaaggcaagaaacttaaaggttcatttgggcctttttaaaagtcagttttgtcacttgtatactatatacaaacacaaacatttacacaagtataaaaatacagacaaagattttatagttttgatttgtgaaaggaaaataaatcttggcaccacaaaatcactaagccaaagggaaaaggcaagccggggactgcttagggcaaacctgcctcccattttattatccctaaataagatagctacagagataagaagccacatacctccctcacaattttcccacaaggaaattctttgtggacaaagaacagacagaactcaaaattgtccctctgaggcttgcctgagacagatgcatatctaattacttcctctgacctattgtttatgtaaaaatgcagattcactgagacagattaaattgtgtattcagtggaagactgatcaagtacttaaaataatgcagccttttgtcttttatctacttctaacatggaaacccccactttgagttgtcctgccttactggaacgaaccaatgtacattttacacatttgattgatgcctcatatctccctaaaataaagcaagctgtaccctgaccaccttgggcacatgttgtcaggatgtcctgaggctgtgtcatgggtgctttcttagctttggcaaaacaaactttctaatttgactgagacctgtctcagttatttagggttcacagattttaatattttacccatgagtcaggcaaaactcagtagtttaaaaagacagttggaatcaaactgtggctttgtaaatggaacgagttaaagtttatctgtctcacaggctgaagcccttactgatttacaaaacaaggtaggaaatttatgtttcatagtacagagaaagagtttaagctttcaaaaggccagtgaagttttacatcattcttggcacaaatcatgtcaacaaaacagaagcaaactaagggagtgcatacagttagtaaggtataaaaaagaaataaaattctaagccccctaactgactgatgggccctcccctctgccaaggacattccaaasttaatctgaaaaattagttcaggccatgatgggaagtggggtgccactggacatgcctcgcagctgaccagtgttaacatcaacacaaagaccttaagactaatagagcaggctggatgtggtggctcgctcctgtaatcccagcactttggaaggcagaggcaggtggatcacatgaagtcaggagcatggccaacatggtgaaaccctgtctctactaaaaatacaaaaattagctgggtatggtggcccatgcctgtagtcccagctacttaggaagctgaggcaggagaatcacttgaactcaggaggtggaggttccagtgagctgagattgcgccactgcactctagcctggacaacagagtgagactctgtcaaaaaaaatactaatagaatctttaagtctgataggaaacgtttacaatctattctctctgaggcccgctacctggaggcttcatcagtgtgataaaaccttggtctctaaaatcccttatcttaacacagaaatttctttgtattgatttcaggtctttagacaataactctttcaaccaattgccaatcagaaaatcttagaatctgcctatgatctggggcccccacttcctattgtcccatytttctggattaaaccaatatacatcttacattaattgattgacgtcttatgtctccctaaaatatataaaaccaagttgtagttcaaccactttgggcacatgttctcaggatctcctgagagctgtgtcatgggtcattggtcattcttattgggctcagaataaatctcttcaaatattttactgtttttcttgacaaaagggttaagaagaaagaaatttagtcaactgacaagtttttatagagaacagaggcccaattaaaaagtatatatgcatatgtatcttaaatatcagcttttaattaaatcgacttttgactatagagatcttaaaaaaaaaacttcaagtctcttatcatatttcagccagaacagtcaatattcctgcttttgtaccatttcccccctcttttaaaccaaaggtatctttgcaagtgactcaccaaaaccaataagctttaaccaatgttatgatrtaatcaatacattgatcaacgagccttctccaaagagatgcaggacagttctcacaagattccagattcatgccaaagaaagttcaaagagagaaaagttttgctagctacaaatgggtgtacaacccatatcactctggccatattctctagggtctcagcttctcagttgactggctacacagagagttcagatgaaaaatttaaagagatatttaatgaagcaggaagacaaaatctgcccataggggtagtgccaaaaggtgggcaaatataggaaggcaaatttatagaggtaaagtctgctcacagattcccctggcccattagtgggctaataagcagctgtctccagtaagggaggatttatgtcctcgctttaggcaaacaaaagaagggcagagaatctccctgccttttagctgtgtttagckcaacaatcctaagtgttttagagggtaatattttggcttccttcagtagaatggattacaaatgggtgacccaaaaggtgtagagtcatactaaaaccacctttgcaaaaattgtatcaatgagtaatataacagtaagttgagctaactaccccactgccccatcttgctgtttcctttattcctgggcgatagggctaagctaactttttctttttcttttttttttttttgagacaatgtcttgctccatcacacaggttggagtgcagtggcactatctcagctcattgcaacctctgtctccagggttcaagttgttttcgtgcctcagtcacccaagtagctgggattacaggagtgcgccacaatgcctggctaatttttttatttttagtagattaggtgttttcccatgttggccaggctgatctcaaactcccggcctcaagtgatccacccacctcagcctcccaaagtgctaggattacaggcatgaaccactgtgcctcgccctaagctatagtttggtgcaaaagtaattgcagtttttgccattacttttaatggcaaaactgcagttagctttgaaccaatctaatacttttggaagacatttagactatagtttaaatgatagcaggcctaaaacttaacaggctttgtaaagctaatgggaggccatgaggcttggggaaggagaggaggctgagtctggctaagactcagacatgaatgattgtttgccactattcttgaggttataagataggcaacttctccaattattcctgcagatgacaccacttttgtagactgaccctttgagacatcctttcaggtttttttgcatgtctaacacccatggctccacctggacccaccaatcccactgctgtggccccacctacaagctatccagcctgcaggagtacagctttaacgcctatgatttcatctccagcccaaccaattagcagcaaacctagccaccccgaccccttcccccaaactgcctttgaaaaactcctaacctatgagctttggatgaaatgatttgagtcccagtgaagcagcatcgttcatctggggtaatacctgagatttgttgcctcacaccaaggaaatcaaggatgtggatacacaagcagtgaggttaagaacagaggcttaacaggcaaaagaaagagaaaagctctctcctgaagagagagggggtccggagcaagttttccagtctgcagtgaagtgtaggaaattttttagatgagcttgaggaggcggtatctgatttacatagggcgtgaaagattggtcaggccaggtgtgccatttgcatagcacagaaagaactggctaggactaggtgtgctgtttgcatagcatgtgaagaagctgcccccaccaaccctaatcttttattatgcaggtgggttctctacctggccaacaccatgttgcctgctactttttaaattttttttaatatgctttaagttctagggtacatgtgcacaacatgcagactcgttacataggtatacatgtgccatgctggcctgctgcacccatcaactcatcatttacatcaggtatttctcccagtgctatccctcccccacccaccccatgacaggccccggtgtgtgatgttccccaccctgtgaccaagtgttctcattgttcaattcccacctaagagtgagaacatgcggtgtttggttttctgtccttgtgatagtttgctcagaatgattgtttccagcttcatccatgtccctgcaaaggacatgaagtcatcctttttatggctgcatagtattccatagtgtatatgtgccacattttcttaatccagtctatcattgatggacatttgggttggttccaagtctttgctattgtgaatagtgcctcaataaacttacgtgtgcatgtgtctttatagtagcatgatttacaatcctttgggtatatacccagtaaggggatcactgggtcaaatggtatttctagctctaaatccctgaggaatcgccacacygtcttccagaatggttgaactagtttacactcccaccaacagtgtaaaagctttcgtatttctccatatcctctccagcatctgttgtttcctgactttttaatgatcaccgttctaactggcatgagatggtatcccattgtggttttgatttgcatttctctggtgaccagtgatgatgagcattttttcatgtgtctgttggctgcataaatgtcttcttttgagaagtgtctgttcgtatcctttgcccactttttgatgtggttgtttttttcttgtaaatttgtttaagttctttgtagattctggatattagccctttgtcagatgggtagactgcaaaaattttctcacattctgtgggtttcctattcactctgatggtagtttcttttgctgtgcagaagctctttagtttagattccatctgcctattttggcttttgttgccattggttttggtgttttagtcatgcagtccttgcctgtgcctatgtcctgaatggtattgcctaggttttcttctagggtttttatggttttaggtctaacatttaagtctttaatccatcttgaattaatttttgcataaggtgtaaggaagggatccagtttcagctttctacatatgactagcctgttttccgagcaccatttattaaatagggaatcctttcctcattgcttgtttttgtcaggtttggcaaagatcagatggttatagatgatgtgtggtgttatttctgaggcctctgttctgttccattggtctatatctctgttttggtaccagtaccatgctgttttggttactgtagccttgtagtatactttgaagtcaggtagcatgatgcctccagctttgttctttttgcttaggattgtcttggcaatgtgggctcttttttggttccatatgaactttaaagtagtttttttccagttctgtgaagaaagtcattggtagcttgatggggatggcattgaatctataaattaccttgggcagtatggccattttgatgatattgattcttcctttgcatgagcatggaatgttcttccatttgtttgtgtcctttttatttcattgagcagtggtttgtagttctccttgaagaggtccttcacatcccttgtaagttggattcctaggtattttattctctttgaagcaattgtgaatgggagttcactcatgaattggctctctgtttgtcaatcattggtgtataggaacacttgagatttttgcacattgattttgtatcctgagactttgctgaagttgcttatcagcttaaggagattttgggctgagacaatggggttttctaaatatagaatcatgtcatttgcaaacagggacaatttgacttcctcttttcctaattaaatacctttatttctttctcttgcctgactgccctggccagaacttccaacactatgttgaataggagtcgtgagagagggcatctctgtcttgtgccagttttcaaagggaatgcttccagtttttgcccatttagtatgatattggctgtggatttgtcacaaatacctcttattattttgagatgcagtccatcaatacttagtgtattgagagtttttagcatgaagggttgttgtattttgttgaaggccttttctgcctctattgagataatcatgtgctttttgtcaatggttctgtttctgtgatggattacatttattgatttgtgtatgttgaaccagccttgcattccaggaatgaagctgacttgaccgtgtcgataagctttctgatgtgctgctggattcggtttgccagtattttattgaggattttcacatcgatgttcatcacggawatttgtctaaaattctctttctttgttgtgtttttgccaggctttggtatcaggatgatgctggcctcataaaatgagttagggaggattccctctttttctattgattggaatagtttcagaaggaatggtaccagctcctctttgtacctcaggtaaaattctgctgtaaatccatctggtcctggactttttttgtttggcaggctattaattattgcctcaatttcagagcctgttattggtctattcagagattcaatttctttctggtttagtcttgggatggtgtatgtgtccaggaatgtatccatttcttctagattttctagtttatttgtgtagaggtgtttatagtattctctaatggtagtttgtatttctgtgggatccgtggtgatatcccctttatcattttttattacatctattttgattcttctctcttttgttctttattagtcttgctagtggtctatctattttgttgatcttttcaaaaaaccagctcctggatttattgattttttgaaggattttttaktctctatctccttcagttctgctctgatcttggttatttcttgtcttctgctagcttttgaatttgtttgctcttgcttctctagttcttttaactgtgatgttagggtgtcaattttagatctttcctgctttcttttgtggcattcagtgctataaatttccctctacacactgctgtaaatgtgtcccagagattctgatactttgtgtctttgttctcattggtttcaaagaacatctttgtttctgccttcattttgttatttacccaatagtcatttaggagcaggttgttcagttttcatgcagttgtgcggttttgagtgagtttcttaatcctgagttctaatttgattgcactgtggtctgagagacaatttgttgtgatttctgctcttttacatttgctgaggagtgctttacttccaactatgtggtcaattttcgaataagtgtgatgtggttctgagaagaatgtatcttctgttgatttggggtggagagttctgtagatgtctattargtccacttggtgcagagctgagttcaagtccgggatatccttgttaactttctgtcttgttgatctgtctaatattgacagtgggrtgttacagtctcccattattattgtgtgggagtctaagtctttgtaggtctctaaggacttgctttatgaatctgggtgctcctgtattgggtgcatatatatttaggatagttagctcttcttgttgaattgatccttttaccattttgtaattcccttctttgtctcttttgatctttgttggtttaaagtctgttttatcagagactaggattgtaacccctgcttttttttgctttccatttgcttggtagatcttcctccatccctttattttgagcctatatgtgcatttggacatgagatgggtcgcccgtatacagcccactaacgggtctggactctttatccagtttgccagtctgtgtctcttaattggggcatttagcccatttacatttaaggttaatattgttatgtgtgaatttgatcttttcattatgatgttagctggttattttgctcgtttgttgatgcagtttcttcctagcatcaatgggctattttttgtatttttagtagagatgaagttttactggtcttgaactcctggcctcgagggatctgcctgccttggcttcccaaaatgctgggattacagatgtggaccaccatacctggcccacaatgtttttctgaagtccaaattacaaacaacaaaaagcagctgtagttttataagcgtgctatgtaatttacaccaagaaatgaaaccaccagtgccagattgccaattcttgtgttctccaaagaggttttcaggaggtttagcatttatacatttccttgaaatggggaaggcatgtaggtggtgtgaggtgaatggttacatccttgtgagactttagttagtrccttgtaaatctacattttacataagataaggtgaatgttttaccaaaaaaagagggagtaaaggaaaatcagttatgcagatttctcagggtaggtggaggattgatcaatctcagcttgtctttgttctgtacttgggaagattatcttgtaattgacattatcagtctgaattttaacagactttagttataggagctagacttatattgcagacctaaagttataattgacatgcccttttttttatggcaggatatacctcctgaaagcttaaggccagcaaagaacaatttgtgaagacagtcatcagggatacctgaggctttttgcctttmtgcaggggttgtggytaatggataatgctttgacacaagattatgaagtaaaagctattcatttgggaaaaggatgatgtgtttgtgttgtgccactcagtcaccaggcttaattttccttttgatgtaaggagtttggggttcctgagattttttttattttcaatttttgtgggtacatcataagtatatatatttatggggtacatgagatactttgatataggcatgcattgagatttttaaattttcctttacagtgctcttgaatcttctctatgcacaaatatattacttgcaaatataacagtttttaaaaattcttacccttatactttgtattttttcttaatttactgtgtaaccatacaatggactcttcttgcctggtgtccacatatagctggtttatcgaggcagaggaattgcaatagagaaagttttatacatgtagagccagtgaaagggaagaccaagttttattattgctcaaatcagcctaccagagaatttgggggctaggatttttccaaggtaatttgagggaacgggtggggtggctaggcagtgagtgcttgttgttgattcattggggttgcaatcacaggggtgtggaagatggtccttctacaagctaagtcgcctctgggtgggaccacaggagcttgggaggtccagctgaagccattggtatcggacatgcgaaaaacctgaaaatatatctcaaaaggccaatcttaggttctacaatagtgatgttatctgcagaagtaactggggaagttgcatatcttgtgacttctggaataatggctggcaatcatttatgtctacacctagcaaaattcaggcctctccatcctcctagcctggtggtctctcattagctttacaacagtggttgagttttagggaagggctattatcatttaagctataaactaaatgtcttccgaagttagcttagcctaagctcaggaataattaaggtcaacttgaagaccaaaggcaagaaggaatttggccagattacatccccttcactgccataatcttctaattgttgtaatttttgcaaaggcagtttcaatcttatcatttacaccctccaggacaatgtttaatacacaaaatgatagtgaaaatcctatggtattcctggctgtaaagggaaagctgttgataattcgatattaaacttagtacttggtgtatatggttgaagatattctttgtaagactaaagaatttttattttttttactagctgtggtaggctgaatagtggctcctccaaagaagtccaagtcctccagagcctgtgaatctgttaccttacctggcaaaaggtactttgcagatgtgtctagtgttggaaatcttgagatgagaagattatcttggattttacaagtgggcccaatcatatcacatgaatctttaaaacyggagtctttctctattttgattaactggaaagatttgaaaacagaagagtcagagagaatgcaatgttgctggcttcggagatagagaaaggggccaaaagtcaaggaatcagaataggttctagctggaaatggcaagaaaattgattctttctttgagtctcagaaggaattgtaaaccaaaaataaaattctaagcatggcccaaccatctgaatggacaccccctctcagccaatggcattccaaagttagtagaagaaaacttagggtaaaagctctttgatactggccttggtaatgattttttagataccacaataaaagctcagacaacaaaagcaaaaataaacaagtgggactacaatgatctatgtttatttaggagtatgctttattctccaaacataaaatttttatcatttattttagattatttgcattgattttggaggacatactctgtgtggtagacaaaataatagtactctaaattatccatgtcattggtttttcctggcacccctgtaaacattgcagtcttttttgaatcaacggataagcagatgttgactacagaatatacaaccccccatattaataaaaaaaatcaactagtttgttcctctctgtcaattgtacatggagttcctggggatttgatgacaggttggctaaacatatatatttaagaggttacagaagaagctatgtgtcatgtgtgtgaagagaccaccaacaggctttgtgtgagcaacaaggctgtttatttcacctgggtgcaggtggcctgagtccaaaaaaggagtcagcaaagggtggtgggattatcattagttctataggtttgggataggcgtacaaagtacattcttaagggtgggggagaatattacgaagtacctttttaagggttggggagactatatcttatcagttagrgtggggcaggaacaaatcacagtggtggaatgtcatcagttaaggctattttcccttcttttgtggatcttcagttgcttcaggccatctggmtgtatacrtgcaggtcacaggggatatgayggcttagcttgggmtcagaggcctgacattcctgtcttatattaataaaaaacaaaacaaaacaaaatagtggtgaagtgttggggtggtgaaaattttggggggtagtatggagagataatgggtgatgtttctcagggctgcttccagcgggattaggggtggcatgggaacctacagtaggagagattaaactgaagaaaggctttggggtaaggggtgatattgtggggttgttagaaggagcgtttgtcctatagaattattggtgatggcctggatgcagttttgtatgaattgagaaactaaacagaagacacaaggcacgaataaaagaaggagaaaagtaggtattaaaggattaagaattgggagtacccaggacatccaattagagagtgtccagaggggttcagtgttaattatttgcttggttggcaagtttttgggctctatccttgagttttttgatactgtttaccaggccagactgatttaggtaaaaacaacactcttcatttaaaaatatacagagtccccctttttttttagcagtgagtaagtcagggccttggcgagttttgaggaaagagaaatgcaaagccagcaattgtttgttaaagaaggattagaaacgggtaggagagagtgagtgagattgatagtgtggtggagatagctggggagaggtagagggtggcataagaacaggaacragaataagagtgagtataaaagtaaagaataggacttcatcagggtgaaagtattggagtgtgtcctgtcagcaaagattgtctgtgcactccaagaggcagtcaagagtggcgggttggggataaattttcatgatggaaaggaaacgagaggttttaagaggtgggctaacagcttgtaacctacatggaagaggttatgaaatgacgacagaatagaatgggcctgtgaggctggaaggagatttttttttggtctaagaaccatctgccttgagtggagagggattgataggtggaaacttcagtaagagagtaaataggcatgaccaatgagatggagaaaaactggctatgagggacagaagttggaacactagctgcttctttagctaccttatcagcataagcattgccctgagtgatgggatctgatgcctttttgatggcccttgcagtgaatgactccagcttccttggaagtaaagcagctttaagaagagtttttattaaggaggcattaatgatggaggacacttgtgtagtgaggaaatttccttctgcccatataacagcatggtggtgcaggatatggaaggcatatttagagtcagtataaacattgatgcgtagtccctttgcaagagtgaaggcctgagttaaggcaatgagttcaacttgctgagaggtagtggagaggggcagagcagtaacctcagtgatagatgtggaagacactatagcacaccctgcctttgctggtgagtggcgattaggcctggtggaattgccatcaataaaccaagtgtgatcagtgtgaggaacaggaaagaaggaaatatggggaaatggagtgaatgtcaggtggatcagagagatacagtcatggggatcaggtgtggcatctgggataatgtgggaggccagattgaactctgggccaggaacaatggtaattgtaggagactcaacaagagtgagtatagctgaaggagctggggggcagaaagtatatgtgtcaagtgtgaggaggaaaatagattttgaaagttatgggaactgtagagagtaagtggagtatagcttgtgattttgaggggctttaaaagtattaaagcagcggcagccacttcacgcagacatgagggctaggctaaaacagtaaagtcaagttgtttggacagaaaggctacagggcacagtcccagctcttgtgtaagaattctgactgcgcagccctgtactttggctgtgtgtaatgaaaagggttgggatgaattaaggagagctagtgtgggagcagcttttagggctgttttttaaggaatggaaaggggagtggggaaaggatttaggatttatggggtcagctaggtttatctagaacagaataatgggttgtagagggaggtattgaggataggagagtatatgtatttggcaccacagggtggataggcaagacagtttggttgataaggcgcagatcctgaactaacctgtaagacttgtctggtttttggataggtaaaatgggggaattgtaaggagagtttataggctttagaagcccatgctgtagcaggagagtgataacaggctttaatctttttaaagtgtgctgtgggatgggatattggcattgagcagggtaagggtgattacgttttaatgggatggtaaggtgtgcatgatcagtcacgaaggagggagtagaggtgtcctatacttgtggattaaggtggggagatacaaggggaggatgtgaaggaggctttgaactgaggaaaaaggtggcaatgaggtgtggctgtagcctaggaatagtcagggaagcagataatttagttaaaatgtttcgacctaataagggagctgggcaggtagggataactaaaaaggattgtataaaagaacattgtccaagttggcaccagagttggggagttttaaaaggtttaaagcctcttgtcaatactcacaacagttatggaggcaagggaaacatgcccttgaaaagaaggtaatgtggagtgggtagcctccatattgattaagaaggggacagacttaccctccactgtaagagttacccaaagcatctgtgatggtcctgtaggcttccaaggtgattgggcagcatcagtcttcagccactaagccgagatctgggaaggagtcaatcagagatccttgggccagagttctaggggctctgggaatggctgctgggtgagttggacagtctgatttccagtggggtcctgcacagatgggacacagcttaggaggagtcctgggctgcaggcattccttggcccagtggccagatttccggcacttgaagcaagatcctgggggaggtggtcctggaggaatgccttgcccctgcggtttaggcattttgaagttcttgtgtgctggagatgtggctgggtttctctcacagtggaggcaagtaattgcaactcttctctattattgtaccccttgaaggtgagatcaattaagtgctgttgtggggttgagggccagaatctaatttttggagctttttctaatgtcgggagtgggttgggtagtaaaatgcatattgagaataagacagacttcaggcccctctgtgtctagggtggtaaagtgtctaaggcttgttgccaaatgggccatggactgggctgggttttcatatttgatgaaaaagagcctaaatgctaactgatttgggagaggtcggataaagaaaaaggagcattaaccttggctatgccttcagcttcagccactctctaagaggaaattgttgggcaggtcggggagggctagtcatggaatgaagctgtaagccagactgggtgtgaggaggggaggtaatagaagggttatagggtgagggagcggaggctgaaaaagagttgggacctggcttggcctggcaaggagcagcctggggaggaggggaaaggtcagatgggtctgtagaaaaggaggattcacaggactcagagcttggggtggagactgaaggaacagacaggagagaaagaagaaagatttgggacgagtcgcattgggaacagagactagggagggaccaatgtgtaaaagaatgcctggctgcctgtacgccaggcacctcagaccatttgcccatttttcaacaaaaattatctagatattgtaaaatggagaaatcaaaagtgccattttctggctatttagaaccattattgagttcttattggggtcaagtggtattgcagaagaaaataaggcatttaggttttaggtcaggtgtgagttgaagaggctttaagttcttgagaacacaggctaagggagaagaagggggaatggagggcagaagtttgcccatagtgaaggaggtaagtttaaagagaaaggtagagagatggagaagggggtggtgagcagccctgggctgcaatatgggtgagcagccaaagcagatgtccccacaattgacttgccaccaagggaatgtgggtgaatgaccaaggcaggtgtccccacagtgatcaaacaccaatggagtgtgggtaaataatcaggcaggtgtccccaaagtgattaaacaccaagggaagactgtcttcccaagtctgtgaccrgcaccggagttttgggtccacagataatatgtgtctccttgtctctactaaagaggaaaaagaactggaattgggaggacagggagattgaagggtagcgagagaggaagattgaagagtagtgagagaagctgaagaagagtgaaaagaccgcttacacgatttgaaattggtgagatgttccttgggctgcttggtctgaggacccgaggtcataggtggatctcctcatggagtgagggcgaggacaggggctggcctcctgaaggagtcctcctgtgccgtgtttcggcaccaaatgtcacgcacgtctgtgtgaagagaccaccaacaggctttgtgtgagcagcaaggctgtttatttcacctgggtgcaggcaggctgagtccaaaaaaggagtcagcaaagggtggtgggattatcattagttcttataggtttgggataggcgtacaaagtatattcttaagggtgggggagaatgttacaaagtaccttcttaagggcgggggggaaactatatcttatcagttagggtggggcaggaacaaatcacaatggtggaatgtcatcagttaaggctattttcccttcttttgtggaccttcagttgcttcaggccatctggctgtatacatgcaggtcacaggggatatgatggcttagcttgggctcagaggcctgacactatgaatatttatgaaagtggccttgacaaatttgtactgaacaaacatgtaacatatgacccatgtttactttggggtggagacaacatttaaatatattacaattaggtcctgtatgtcaaaggtctttttaggacaaaaaggtacacaattgcacaatttctgtaaactggccagaactagtctgtgattagtagtatttttatcagaagaaagttactgaaatcagtatcttatccagtaaaagttacagctgtgactggtggaacaggagttcagtttttcagcatctggtggagctgaaaattgttttatgattccttatttttctttttcagcttaaaatagctgctagaaaaaagaaaaccttgtggcagttagaacataatttatcctttaagcataggggtgtgtgaattaactcttacctggcatggtcttaggtatcttaagacctaagataggtcttttataatttggtatcttattgccacacagagtctgttctgtcggtcttatgatctctattttaatatcaatgctggtcagttgttgtgtctacaccataaaagagagggggtataatgggacatgtctgccttcctgtcccatcatggaggggaactaagtttttaaatttttgtggggttcccttggccaatgggggtggggtccattcagacgatgggtggcttaagattttattttttagtttacattccccgtttttggtcaagatataccagaagcagcattgatggccaatattttattttgtcccatacagttgctgtggtggcgtggcaacttgtccagggtccctcatgtcccttggcaggaaccctatggccaaggaaatttgagccaaaagacttataaacaactaaacattttaggctatatgggaatagaggtgggtaggcactcattaatccttgaaaccctctaagtaacataagagccaaaaacccaaagccaaaaagcagtgttaaaaaattgacttatctataaattctatgtgttgagccatcagctatttagacacctgtgtatccatctttggtttggaaggtctgaaagaattttctgtctgaaaactcgctcttacaatctcaggcactcacctcttctgcaattgtccctagtcctaggggaattttgaatagttttcaaattctggatcaggtagagacatagataaactttattgttttactcaagcttgtaaactataaatagttttaaagaaaaaggttttcttgactctggaaaataaaacatgaagaattagcaatgattatttgattttgagaatgttttttgaagatgctaaaaggttcaaaacatttgattaaaacagaatcatagattattgtaaaataatagttccttatttaaccaaagtgataaaaaaaactttgaagtcaatacagaaggttatatgaatgtaaaaactttaaccccctttaagcataattttcctaagtaattaaaaatctaatgaagataacatagaaaatatcttgaaaaaaaattgtctatgtcctaatctctggagactgtatgtaaccttacatggcaaaaagggctctccagatgtcattaagttaagaagactatccagggttatctgggtgggcctaatgcaatactaaaacttcctataaaggaaagaggcaggcaggagtgtcaaggggagagaagatgtgatgacagatgcagagttcagaatgatgcaaaggagctgtaagccaaggaatgcaggtggcctctagactctggaaaggcattggaatccattctctcctagagcctccagaaggaacacagccctgccaactccttgatttaggacttctgatcaccagaactgtaagataataaatttgtgttgtttatggacactacatttatggcaaattgttacagcaacaataggaaaccaatacatactgcataatttccatcatttgagatatatttaaacattttttttcagtttctgtgaagttatttatgtgtatgcttgaaaagaatgtgtatttttgagtaccatgttttatatatacctattggattaaggtttaaaattgttttcattaggtagtgtatatgcatactgaatttgtaaaataatatacagagagtggtatattaaaattttttacaatggaagagttgtaatttctcctatttctccttattttgtaaaagtttatgcattttgagcctgtgttattaggtgcatataaattcatgattgttatatttgcctgttgtactcaccttttggcaatgaaaacatagaatatttttggccataaagtctgttctgtctaatattaatgtagtgacaccagctgtatttcgttagttattgcctgctgaattctcttgcatgctttcattttctaccttttaatactcttaatggatgtgacttttataagctgcatataagtggattttggaatttttctacaatctgaacatattagtcttttaatctaaacatttcatatatttacatttaacataaaacttgatatacaatatttgggttttaattactatcaaactatatagtatacatatttttctccctcttccatatttttttccttttattttttgccttctttagaatttataacacttttttattattcagtttcttttctacattagctttgatgttatacaatctataaatattttttgtggttatcctagaaattttatcctacatacagatgtaacatgaaagtctaatattaattatatcaactctttctgaacaatacaaagccttagataattttattttatccttgtctccaactttgtatgttattgctgctatgtattttaattctccctacatatttttaaataatttgttggtaaatatttttattgaggtataacatacataaaatacccagattttaagttgaccttgatacatttttacaaaggagtaaccctctgaaactaccaagcaaattaaaatatagataatttattgtacactagaagctctccttgtgctctgttatggtcttaatatgtctcccaaattcatattttgaaatttaatcactaaagtgatagtattaagaggtagggcctttgggaggtgattacatcataaggttgaaatcctcataaatagtattaatgcccttataaaagaggcttcagaaaactgcctaacatttttccttttctctctgtcatgtgagcatgtagcattcactccttttaccctttcactcttctgccatgtgagaacacagcaacaagataccatcttggaagcagagagtaagccttcaccagccacggaatatgctactgccttggccttgggcttcccaggctccagagctgtgagaaataaatttctattgtttataaattaccaagtatctggtattttctaagagcaggaagaatagactaagatgacctctttgtgtcaataccccataaggttaagcggtgattctaatttctctcatcaaagactattattttcttttattgaacttcatataaatagaatcataatatacctacttcctggtttctagcttctttctgtgaacattatttttatgggatttacctaggctgttgcacttagcmgtaactaaatatttttcactgatgtttagtactatattatctaaatgtaccattctttattttagcattatagtttttgctattttgaataaacctgttaagatttttttgtacatgtcttttggtacaaatatccgctaatttaatttgggtctgtacagtcagttctcctataatgtgccatatatgttcctaaaaatcactgcaatatgcaaaattgtacaataaaaactgagttatgagaaaaatgggattaatggtataacactcaagtacattgtcagtgataaataaagaggtaaacaaaaggaatagtacactattacacatatttgatagttaaaacatacataaatactacaataattatgagagtttatattgaagaatacatgaaatttccttgtggaaataggtgtcaggaggtagcagcatgtgggatactgtgaagtagtagaaggagagttatcagacatcagacagaaggctataacaccaggtgtggatgggcaggattcattgtctttggctggatttgttgactcttgatcttttgcaattcttaaatacttgggcatttttttcttgcctttgggttgtaggtactttgagatttttaatgcgtgtctgttttttcaaaattgccatttttgaaccaatgtgtagctatcttcttcaattaattttaatatcactgctgaaaattcttttgtggctttctcatttgaacttatggtgtcatctgatggccgaaggctttggagattgtagtgatgtttgaaaccactgaattagccattaataacactgaagggagccatttctacaggattgrgtaatttctgtttaaagtcttcacatacaaatagtatgccctttttttccattttccctgctggtgttttgaaccaggacacttaaacatgtttgggatattgaaagagtgtttgcttatatacagtagttttcaaatgtaacaagacaataaacaaacccttgagatcaatacactcagtgtaccgagatagcttttagatgtttgaggtatatgagtgtgttttgtgtattcttatgtgaattggtttaacttggtacagtttctatttcactttgtgcttcttgctgctgaaactgcctgtaagaaaatatgaaattctcattatgctcaaattttmtctcaataaattgattgcactgaaaaatatttgacttttcaaaaaagtattatacttttcaaaagaagatagacatgtgaccaagtagcatatgaagaaaagctcagtatcactgatcattagagaatgcaaatcatctcacaccagtcagaatggctattattaaaaggtcaaaaaataacagatgctagtgatgctgtggtgaaaaggaatgcttgtatactgttgatatgagtgtaaattagttccaccattgtggaaagcagtgtggtgactcctcaaagagctaaaaacagaactaccattcaacccagcaatctcattcctttgggtatatacccaaacgaatagaaatcattttaccataaacacatatgcaggtgaatgttcactgtggcactgttcactatagcaaagacatagaatcaagctaaatgcccatcaatgacagattggataaagaaaatgtggtacttatacaccatggagtactatgcagccataaaaaagaacaagatcatgtcttatgagaacacagatgaagttgaagtccattgtccttagcagaccaacacaggaacagaaaaccaaacatcccatattctcagccttttttttttttttgacagagttttgctcttgttgcccaggctggagtgcaatggcatgatcttggttcactgcaacctctgcctcccagtttcaagtgattctcctgcctcagcctcccgagtagctgggagctaccaccatgcccagctaatttttgtatttttagtagagatggtgtttcaccatgttggccaggctggtctcgaactcctgacctcaggtgatccacccacctcagccttccaaagtgttgggattacaggtgtgagtcaccatgctggcatattctcatttataagtgggagctaaataatgaaactcatgacacaaagaggggaacaacagacactgaggcctacttaagggcgaagggtgggagaagggagaggattagaaaaaataactattgagtactaggcttagtataggagtccctatactgctgtcagaaaatttctcagcaaaagttttacagtccaggagagagtaggatgatgtattcaaaatggtaaaagcaaaaaaaamaggactgccaaccaaaaatactttacctagcaaagctttctttcagacatgagggagaaataaaaacttttcctgacaaataaaagctaagggattttattaccactaggcctgtcttacaggaattgctaaagggagttctttaagctgaaactaaaggctgctaaggaatgacataagatgtataaaagtacaaaacttgatgatacattaatatatagtgatactcagaatactctaatactataaatgtggtgaattcagaaattttatctgtagtattatggttaaaaaacaaaattattaaaaacaactgcaggtacaataaattgttaggggataaaaattacaaaaagatgttaattttgtcatcaatgtcataaaaggtgggaggggctgtaaatgtagagtttttgtatgtgattaaagttaagttgttattagcttaaaatagcttgttattaagtatacaatgttttacataagcctcaaggtagccacaaagcaaaactctatagtagttacacaaaatataaaaagaaagaattcaaagcatatcactacagaaaaccatcaaaccatagtgaaagacagcaagtgagaaaaaggcaaaatatccacaaaatacccagaaaacaaattacaaaatgggagtagaaagttcttacctatcaattactatattaaatgtaaatagattaaattctcaaattaaaagacataaatgtggctgaatggcttaaaacaaacagaaaaagatcttagtatagactacttataaatgactctctttattagtaaggacacaaagagagtaaaattcaagggatggaagaagatattttacacaaacggaaaccaaaaaagaccagggagagctatgctcatatcaagaaaatagtccttaagtcaaaaaccttaaaaaggagacaaagaaggtcatatataataataaagggataaattcataaagaggacataacaactgtaaatacatataaaccccaaattggagcatgtaatgtattatgaaactattaagtaatctaaagggagaaatgtacactaataccataatattagggaaacacaatgccccactttcaagaacagacaaatcatttaaacagaaaatcaatagggaaacattggacttgaattacacatttgaccaaataaaccagacaaacagaacattgyatccaagtgtaacagaattcacagttgtctcaagtggacatgggacattctctaagatagatcatatgttaggccaaaaacaaaccaacaaacaaaaaacaagtcttaacagatttaagaaaattgaaatcatatcaagtatcttctccaattacaatggcataaaactagaaatcaataacaggagagatcttggaaaattctacaaagtgtggaaattaaataaaatgccttgaaataatcaagaggtcacagaagaaattaagagggagattaataatcttacaaacaaaaatggaaatacaatataccaaaacttatgggatgcagcaaagcagttctgagagggaagttaatagcaaaccctatagagaaagacatttgggacaggccatcyaagaggcagagatagctttatgttcctccatgaattgcaaagaaatatgctccacctcctttttttacaatgagatagaagccacaagtgtgatcttgagcatggagttcgatgggggagatggagaagtagagcctagtggactgtgaaattaaagctatgcacccagtttacaacacagctgttgaggaaggatgagacagagtttctgttcttgggtaaggctgtagggcagggggttatctgaacagctctgcacacacacacaatcacatgtacagttttgcacacacagtcacacacacagatagagaattagaccactttgtggggggtggggggaaggggggcttcctatacctcatgtacactgtgctttccatgttcatatggttatgtctatgtatcacaaaatccctgagatacatattattaaaccaatgttatggagagagaactaaggatcatagaaactaattaatgtacctaaggttatacaggaagtaagtggccaggttaaactaggtttctgtagttacaaaagccatctacttctcattacaccatgttgcatctctcaatttaaaattacagtttaattgtagatccttgaggaattgccacattgtcttccacaatggttgaagtagtttacagtcccaccaacagtgtaaaagtgttcctatttctttgtagggacatggatgaagctggaaaccatcattttcagaaaactatcgcaaggacaaaaaaccaaccaccrcatgttctcactcatcagtgggagttgaacaatgagaacacttggacacaggaaggggaacatcacacaccggggcctgtcgtggggtggggggagcggggagggatagcattaggagatatacctaatgtaaatgacaagttaatgggtgcagcacaccaacatggcacrtgtatacatatgtaacaaacttgcacctagtgcacatgtaccctataacttaaaagtataataatttaaaaaaaaatttwaaattttaaaaattttaaaaataaaataaaataaaattacagtttaagattacagctctgtgcgaaaagtttaggactatttccaacctggcagctcagttaagtacaagaagatgaaccagtctgcattgcccagtggaatttccaaaggaaccaggaggaagaggtggtttgtgagcctcttcaggccagctggcagaaggtcccaacacgccctcttagcctttcaagatgtccttttagacagatttttcttctgcaggaaaagtcaacagtagctgcacaatggcaaatgtcatgaatgtgccctcaggacaggagacagattgttcttcctggttttataggcaaaataatgtgcttgtgtcagggatcaatttaatccacctatcttcacttgcttgccatttcaacctcttaaatactgtgaaatagttgtcactgaatctccatttgccagtttggcactaccctgatccaagtaccctgcccttgcactccaaccctgtattcagtcttgtagtatctctagggagtgaccccagacacattccctgggtaaattttcagggctccaattccattggtgaatggtcgttgatagaaagccccatgtgaaccaagaacttcatctgtctggattgtacacacagaaatctcacccacgcttttcatgtaaatgtctgcctcccagccctggacacattttgagataatttagataaataattgatatcacaccttggcatttctgcccactttctgcattccaccgtcttgaggatgactaccttatcctggtttgcccagaactttctgagttttggcactgaaagtcttctatcctgggagactcctcagctctggacaaatcaaggtaatagaccattgcaattactattttgtctcggattctagctcacaaagtgcttcagcactcaggttaatttctaggggccttgttccattgtgatatttctttaacactttatttatttatttatttttccataagttattggggtacacatggtatttggttatatgaataagttctttagtggtgatttgtgagattttggtgcactcatcacctacacagtatacaactgcaccatatatgttgtcttttatccctcacttccctcccactcttccccrtaagtccccaaagtccattgtataattcttatgcctttgtgtcctcatagcttagctgccacatatcagtgaaaacatacgacatttggttttccattcctgagttacttcacttagaataatagtctccaatctcattcaggtcagtgcaaatgctgttaattcattcctttttatggctcagtagtattccatcatatgtttatatcacggtttctttatccacttgttgattgataggcatttgggttggtctcatgattttgcaactgtaaattgtgctgctatagacatgtgtgtgcaagtatcttttttgtataatgacttcttttcctctgagtagatacccagtagtgagattgctggatcaaatggtggatctacttttagttctttaaagaatctccacactgttttccttggtggctgtagtagtttacatccccaccagcagtgtagaagtgtttcctgatcaccacatccatgccagcatctcctgtttttgatttttttgtttgtttgtttatacaagcttaatctatttattcaaaatatgaatcatcaatataatttgccactagtatctcattcagtcccttcactggacacgtaatccactgggagataagagattagcagctggcaggcagtgatgcacagcaaaaacaaaaaccaagaggtgaaatagttctgaaataaagaaggttttaaagctaagagaaattattgaattactaagtcattaccactaattttgagccaactaactaattaatatgagatgatacaaygtcctatgctttggtaaatacaaactatgtttaaacaatgtctgtaatgtgactttcaaaatgcttctggctttacaaagatgtgattaaaatgtagtaatacatgataaagcatttacccctgcagagcatgttgtaatgttcttttttattttattttattattattatacttttaagttttagggtacatgtgcacaacgtgcaggtttgttacatatgtatacatgtaccatgttggtgtgctgcacccattaactcatcatttagcattaggtatatctcctaatgctatccctcccccctccccccaccccacaacaggtctcggtgtgtgatgttccccttcctgtgtccatgtgttctcattgttcaattcccacctatgagtgagaacatgcggtgtttggtgttttgtccttgcgatagttttctgagaatgatggtttccagtttcatccatgtccctacaaaggacacgaactcatcattttttatggctgcatagtattccatggtgtatatgtgccatattttcttaatccagtctatcrttgttggacatttaggttggttccaagtctttgctattgtgaatagtgccgctataaacatacatgtgcatgtgtctttatagcagcatgatttataatcctttggttgtatacccagtaatgggatggctgggtcaaatggtatttctagttctagatccctgaggaatcgccacactgacttccacaatggttgaactagtgtacagtcccaccaacagtgtaaaggtgttcctatttcttgacatcctctccarcacctgtgtttcctgaccttttaatgatcgccattctaactggtgtgagatggtatctcattgtggttttgatttgcatttctctgatggccagtgatgatgagcattttttcatgtgttttttgctgcataaatgtcctcttttgagaagtatctattcatatccttcaaccactttttaatggggttgtttgtttttttcttgtaaatttgtttgagttcattgtagattctggatattagtcctttgtcagatgagtaggtttcaaaaatktcctcccattctgtaggttgcctgttcactctgatggtagtttcttttgctgtgcagaagctctttagtttaattagatcccatttgtcatttttggcttttgttgccattgcttttggtgttttagacatgaagtccttgcccatgcctatgtcctgaatggtattgcctaggttttcttctagggcttttatgattttaggtctaacatgtaagtctttaatccatcttgaattaatttttgtataaggtgtaaggaaggaatccagtttaagctttctccatatggctagccaattttcccagcaccatttattaagtagggaatcctttccccatttcttgtttttctcaggtttgtcaaagatcagatagttgtagatgtgcggcattatttctgagggctctgttctgttccattggtctatatctctgttttggtaccagtaccatgctgttttggttactgtagccttgtagaatagtttgaagtcaggtagtgtgatgcctccagctttgttcttttggcttaggattgacttggcgatgcgggctcttttttggttccatatgaactttaaagtagttttttccagttctgtgaagagagtcattggtagctgatggggatggcattgaatctataaattaccttgggcagtatggccattttcacgatattgattcttcctatccatgagcatggaatgttcttccatttgtttgtatcctcttttatttcattgagcagtggtttgtagttctccttgaagaggtccttcacatcccttgtaagttggattcctaggtatttcattctctttgaagcaattgtgaatgggagttcactcgttcactcatgatttggctctctgtttgtctgttattggtgtataagaatgcttgtgatttttgtacattcattttgtatcctgagactttgctgaagttgcttatcagcttgaggagattttgggctgagacgatggggttttctagatatacaatcatgtcatcttcaaacagggacaatttgacttcctcttttcctaattgaataccctttatttccttctcctgcctgattgccctggccagaacttccaacactatgttgaataggagtggtgagagagggcatccctgtcttgtgcccgttttcaaagggaatgcttccagtgtttgcccattcagtatgatattggctgtgggtttgtcataaatagctcttattattttgagatccatcccatcaatacctaatttattgagagtttttagcatgaagggttgttgaattttgtcaaaggccttttctgcatctattgagataatcatgtggtttttctctttggttctgtttatatgctggattacatttattggtttgcatatgttgaaccagccttgcatcccagggatgaagcccacttgatcatggtggataaactttttgatgtgctgctggatttggtttgccagtattttattgaggatttttgcattgatgttcatcaaggatattggtctaaaattctctgttttggttgtgtctctgccaggctttggtattaggatgatgctggcctcataaaatgagtgagggaggattccctctttttctattgattggaatagtttcataaggattggtaccagctcctctttgtacctctggtagaattcrgctgtgaatccatctggtcctggactttttttggttggtaagctattgattattgcctcaatttcagagccttttattggtctattcagagattcaacttcttcctggtttagtcttgggaggatgtatgtgtcaaggaatttatccatttcttctagattttctagtttatttgcgtagaggtgtttatagtattctctgatggtagtttgtatttctgtgggattggtggtgatatcccctttattattttttattgtgtctatttgattcttctctcttttcttctttattagtcttgctagtggtctatcaattttgttaatcttttctaaaaaccagctcctggattcactaattttttgaagggttttttgtgtctctatctccttcagttctgctctgatcttagttatttcttgccttctgctagcttttgaatgtgtttactcttgcttctctarttcttttaattgtgatgttagggtgtcaattttagatctttcctgctttctcttgtgggcatttagtcctataaatttccctctacacgctgctttgaatgtgtcccagagattctggtatttgtgtctttgttcttgttggttttgaagaccatctttatttctgccttcatttcattatgtccccagtagtcattcaggagcaggttgttcagtttccatgtagttgagcggttttgagtgagtttcttaatcctgagttctagttagattgcactgtggtctgagagacagtttgttataatttctgttcttttacatttgctgaggagtgctttacttccaagtatgtggtcaattttggagtaggtgtggtgtggtgctgaaaagaaagtatattctgttgatttggggtggagagttctgtagatgtctattaggtttgcttggtgcagagctgagttcagttcctggatatccttgttaactttctgtctgattgatctgtctaatgttgacagtggggtgttacagtctgccattattattgtgtgggagtctaagtctctttgtaggtcactaaggacttgctttatgaatctgggtgctcctgtattgggtgcatacatatttaggatagttagctcttgttgaattgatccctttaccattatgtaatggccttctttgtctcttttgatctttgttggtttaaagtctgttttatcagagactaggattgcaacccctgcccttttttgttttccatttgctggtagatcttcctccatctctttattttgagcctatgtgtgtctctgcacgtgagatgggtttcctgaatacagcacactgatgggtcttgagtctttatccaatttgccagtctgtgtcttttcattggagcatttagcccatttacatttaaagttaatattgttatgtgtgaatttgatcctgtcattatgatgttagctggttattttgcctgttagttgatgcagtttcttcctagccttgatggtctttacagtttggcatgcttttgcagtggctggtaccagtttttcctttgcatgtttagtgcttccttcaggagttcttttagggcaggcctggtggtaacaaaatcagcatttgcttgtctgtaaaggattttacttctccttcacttataaagctcagtttggctggatatgaaattctgggttgaaagttcttttctttaagaatgttgaatattggtccccactctcttctgtcttgtagagtttctgccgagagatcagctgttaatctgatgggcttccctttgtgggtaacccgacctttctctctggctgcccttaacattttttccgtcatttcaactttggtgaatctgacaattatgtgtcttggagttgctcttcttgaggagtatctttgtggtgttctctgtatttcctgaatttgaaagttggcctaccttcctagattggggaagttctcctggataatatcctgcagagtgttttccaacttagttccattctccccgtcactttcaggtacaccaatcagacatagatttggtcttttcacatagtcccatatttcttgaaggctttgttcgtttctttttattcttttttctctaaacttctcttctcgcttcatttcattcatttgatcttccctcactgataccctttcttccagttgatcgcatcggctactgaggcttctgcattcatcacgtagctctcgtgcctttgttttcagctccatcaggtcctttaaggacttctctgcgttggttattctagtkatccattagtctaattttttttcaaagcttttaacttctttgccattggtttgaatttcctcctgtagctcggagtagtttgatcttctgaagccttcttctctcgactcatcaaagtcattctccgtccagttttgttccattgctggtgaggagctgcgttcctttggaggaggagaggctctctgatttttagagtttccagtttttctgctctgttttttcccatctttgtggttttatctacctttggtctttgatgatgatgatgtacagatgggtttttggtgtggatgtcctttctgtttgttagttttccttctaacagacaggaccctcagctgcagatgtgttggattttgctagaggtccactccagaccctgtttgcctgggtttcagccgtgatggctgcagaagagcggatgttggtgaaccgcaaacgctgctgtctgatcgttcctctggaggttttgtctcagaggagtacccagacgtgtgaggtgtcagtcygccactactggggggtgcctcccagaaaggctactcgggggtcagggacccacttgaggaggcagtctgccagatctcagatctccagctgagtgctgggagaaccactactctcttcaaagctgtcagagagggacatttaagtctgcagaggttactgctgtctttttgtttgtctgtgccctgcccccagaggtggagcctacagaggcaggcaggcctccttgagctgtggtgggctccacccagttcaaacttcctggcagctttgtttaccttatcaaataactaactcggcaatggcgggcacccctcccccagcctcgctgccaccttgcagtttgatctcggactgctgtgttagcaatgagcaagactccgtcggcataggaccctccaagccatgtgcgggatataatctcctggtgtgtcgttttttaagcccattggaaaagcacagtattagggtgggagtgacccgattttccagatgccgttctatcacccctttctttgactaggaaagggaattccctgaccccttgcgcttcccaggtgaggcaatgcctgcctcaccctgcttcagctcgtgcacggtgcactgcacccactgtcctgcacctactgtctggcactccccagtgagatgaacccagtacctcagttggaaatgcagaaatcacctgtcttctgcgtcgctcatgctgggagctgtagaccagagctgttcctattcggccgtcttggcttctctcccccctgtttttgattttttgattatggccattcttgtgggagtgaggtcatattacattgtggttttcatttgcatttccctgatcattartgttgttgagcatttttccatatgtttgctggccatttgtatatcttcttttgagaccagtctattgatgtctttagcccacatttggatgggactgttcggttttttcttactgatttgtttgagtttgttgtagattctggatattagtcatttatcagatgtatagattgtgaatattttcttccattctgtgggttgtctgtttattctgctgactgttccttttgcagtgcaaaagctctttagtttaattaagtcccaattatttatctttatttttattgtgtttgcttttgggttcttggtcatgaaatctttgcctaagccaacgtctagaagggttctctccaatgttatcttctagaatttttatagtttcagctcttagatttaagtccttgatccatcttgagttgatttttgtataaggtgagagaggaagatccattttcattctcctacaaatggctagccaattatcccagcaccatttgttgaaaagggtgtcctttctctatgttatatttttgtttgttttgtcaaagatcagttgggcgtaagtatttgggtttatttctgggttgtctattctgttccattgccctatttgcctatttttataccagtaccacactgttttggtgactatggccttatagtatagtttgaaatcaggtagtgtgatgcctccagatttgttctttatgcttagtcttgtcttggctatgtgggctcttttttggttctatatgaattttagaattgttttttctaattctgtaaagaatggtggtggtattttgatggggattgcattgaatttgtagattgcttttggcagtatggtcattttcacaatattgattctaccgatgcatgagcatgagatgtgtttccatttgtttgtgttgtctgtgatttctttcagcagtgtttagtagttttccttgtagagttctttcaactccttggttatgtatattcctaactattttattttttgcagctactgtaaaaggggttgagttcttgatttgattctctgctttgtcactgtttttgtatagaagagctactgatttgtgcacattagtcttgtatctggaaacttcgctcaattctttttatcagttctaggagctttctggaagagtctttaaggttttcagggtaaacgattatattgtcagcaaacagtgacagtttgacttcctctttaccgatttggatgccctttctttttttctcttgtctaattgctctggctaggacttccagtactatcttgaaaaggagtggtgagaatgggcatccttgtcttgtctcagttctcagagggaatgctttcaacttctccctattcagtattatgttgcctgtgggtttgtcataggtggcttttattacattgaagtatgtcccttgtatgctgattttgctgagagttttaatcataaagtgatgctggatttcatcaaatgctttttttttcatctattgagatgatcatgtgatttttgtttttaattatgtttatgtggtgtaccacatttattgacttgcatatgttaaactgtccctgcatcccaggtatgaaacccacttgatcatggtggattatctttttgatatgctgttagattcagttagctagtattttgttaaggattttagcatctatgttcatcaaggatatcagtctgtagttttcttttttgcttatgtcctttcatgagttttggtattagggtgatgctaacttcatagaatgaattagggatggtttcttcgttctctgtcttgtgaaatagcttcaaaaagattggtaacaattcttctttgaatgtttggtagaattctgctgtgaatccatctggtcctagactttttgttggtaattttaaaattagcatttcaatctcactgcttgttattggtctgttcagcatatctaattcttccttatttaagctcagagggttgtatttttccaggaatgtatcaatttcttcaaggtttactagtttatgtgcataaaggtgttcatagtagccttggttggtcttttgtatttcaatggtgtctgttgtagtatctcctgttttgtttctgaatgaggttatttggattttctttcttcttttcttggttaatcttgctaatggtctatcaattttatttatcttttcaaagaaccagctttttgtttcatttactttttgtattgtatttttgtttcaatttcatttacttcttctctgttcttggttatttcctttcttctgcagggtttgggtttggttttttcttctttctctagttccttgagatgtgaccttatcytttttttttttttttttttttttgagattgagtctcgctctgttgcccaggctggagtgcaatcaatcttggctcactgcaacctctgcctcctgggctcaagcrattctcctgccttagcctcccgagtagctgggactacaggcgtgtgccaccatgcctggctaattttttgtatttttagtagagatggggtttcaccatattagccaggatggtctcaatcccctgacctcatgatcctcccacctcggcatcccaaagtgctgggattacaggcatgagccaccatgcctggccaaggtgtgaccttagaatatcaatttgtgctctttcagtctttttggtgtaggcatttagggctatgaactttactcttagcaccattctttaacactttaactcagtgtattcaaaacatattctactcaatctcttctcttttgctaccagcatttccccagtctactaggtatgcaaactagagtccttttctttgcatagtgcaagagagatggagacacggatcaatcagcaccaagtcccttgcagtcttccttccttccctattcagttttctttcacttccttcttggccacctgcaaaacttgtcactgacactactagaatagcttcctaactgcagtttgtaccttttctttcattcagttcaaataatcttaaaaacttctgttaaattaatctttctaaagtgttactctgattggaccacttccctcaaaaaaaatctttatgttcttctcctgcctattgaagtgagtaaaaattcctcaacctgggattcagggccttctaccatgacaacttgaaattacagactcatctcctattgctttcctatttatgtactatacctcctagccacagtgggcttttcattgaggcttaaagatgctctgctgatagagctttgttcatactttcaaccccaaataatgcctttctacagtgcgtgtttccagctgtcaaaggcaaatgctttccttgaggtgcatttcatataattctctctacatgcactattttctaattcttcctaattaatgttataatacacattttgaaccctcagtattttgagtaaacctttcttatagaatctttttcactttatcttgcattatagttrtttgcctacttgtgtcatgttctaataaaacataaagctcttagaagactaactcttgaagcacctaacagtgttttgcatatcacagatatgcactaagaagctgatttgttcagtattgaaagatgggcagcagtcagaaaaatggagagaacagaaaagatctaggtgggaaaatggctaaagatgtgatcaagcattgtgaaaacagagaaatgagagtgcaaatagaatatagtgaaaagatagggtagctagaacaaaggatttctgaatgaaaatgttgggagataaatgttgggagggtaaattggagccatattgtaagaagttaatttgggctcaagcccagatcacttacagtgcaacaatcaataccatgatgtgctgctggacattccatctgagctctgtaacagtttcctgtttgaaatgaggtaaaaccaggtttctcagaccaatatactaagtgagtaacaggcagtctttggatgtggttatttgactgtggactattgttttaagctctattgtttgtaggagtcaaatataattactgtacttgcctttccttgacctcgggctctgtgcttagaaactaaagattggataagttgcccaagttcaatatgggtagctcagttactgatgcttattaaaatgcccttgataggccgggtgcagtggcttacacctctaatcccagcactttgggagtccgaggcaggcggatcacctgaggtcaggaatttgagaccaatctgaccaacatggtgaaaccccatctctactaaaaatacaaaaattagctgggctaggtggcatgcgcctgtaatcccagctactcaggaggctgaggcaggagaatctcttgaacctgggaagtggaggttgccgtgagcaaacagtactgaaaggcctgtactaaaaaacagtagcccacatccttctctgtctcacatatatagttcctatttcacagagaacaccacttttgtcttccctcataattatttccacacctcttaatgaagagcttatacttctgttaattgatttatcaattatagatgttttctattcactttatgttataatagctgtggatctgactctcttgggctccacttgtcctcttcatctctctccagattattactattttaattaaaagagtagtcagcgactatatcatcattatcataaaaattttattcactgtatcattcttaagcctttgcatcctcagcttagctcccacttaggagaacatatgatgtttggttttccattcctaaattacttcacttagaataatagtcttcacttccatccaggttgctgcaatgccattaattcattccttttatggctgaatagtatttatatatatatatatatatatatatatatatatatatatatataccacaattatatacatattatatatatataccacaattatatatacacacacacacacactatatatatatatatatatatatatatatayacaccacaatttctttatccactcattgattgataggcatttggaccggttccatacttttgcaattgcgaattgtgcgaattgtgctgctataaacatgaaactctttagtttaattaagtcctacctatttatctctgtttatgttgcatttgcttttgggttcttggtcatgaaacccttgcctaagccaatgtctacaagggtttttctaatgttatcttctagaatttttatagtttcagtcttagatttaagtccttgatccaccttgagttgatttttgtataaggtgagagaagaggatccagtttcattctcctacatgtggctagccaattatcccagcaccattttttgagtaaggtgtcctttctcactttatgtttttgtttgctttgtcaaagatcagttggctgtaagtatttgggtttatttctgggttctctattctgttccactggtctatatgcccatttttgtaccagtaccatgctgtttcagtcactatggccttatagtttgaagttaggtaatgtggtgcctccagatttgttcgttttgcttagtcttgctttggctatgtgggctcttttttgtttccatatgaattttaaaaatgttttttctagttctgtgaagaatgacggtggtattatgatggggattgcatgaatttgtagatcgcttttggcagtatggtcattttcccaatactgattctatccatccatgagcatgggatgtgtttccttttgtttgtgtcatctctgatttctttcagcagtgttttgaagttttcattgtagagttctttcacctccttggttaggtatattcctaagtattttactttattttttttcaggtattgtaaaaggggttgagttcttgatttgattctcagtttggtcactgctggtgtatagcagagctactgatttgtgtacattaattttgtatcctgaaaccttgctgaattctaggagctttttggaagagtgtttagggttttctaggtatacaatcatataatcagcaaacagtgacagtttgacttcctctttactgatttggatgctctttatttctttcccctgtctgattgctctggctaggacttctagtaccatgttgaatagaagtggtgagagtgggcatccttttcttgttccagttctcagagagaatgctttcaacttttccccgttcagtattattatgttggctatgggtttgtcatagatagcttttattatattgcagtatgtcacttgtatgccaattttgctaagggttttaattacaacgagatgctagattttgtcaaatgctttttctgcatctattgagatgatcacwtgattttttgtttttaattctgtttatgtggtgtatcacatttattgacttgcatatgttaaaccttccctgcattcctggtataaaacccacttgatcatggtgaattatctttttgatatgctattggattcagttagctagtattttgttaaggattttagcatctatcttcatcagggaaattggtctgtagttctctttatttgttgtgtcctttcctggttctggtattaggatgatactggcttcatcaaatgatttagggggaattccctctttctctgtcttktggaatagtgtcaataggattggtaccaattcttctttgaatgtgtgatagaattcagctgtgaatttgtctggtccttgacatttttttgttggtaattttttttattaccatttcaatctcattgcttgttattggtcttttcagggtttccaattcttcctgattcaaggtaggagggttgtatctttccaggaatttgtccatctcctctaggttttctagtttatgtgtgtaaatgtgttcatattagccttaattatttttttttgtatttctgtggtgctacttgtaatttcatgtcttaatgagattatttggattttctctcttctttttttggttaatcttgctaatgatctattaattttatttatcttttcaaagaaccagctttttgtttcatttatcttttgtttgtttgtttgtttgtttccatttcatttagttctgctctgatctttgttatttcatttcatctgctgggtttgggtttggtttgtcattgtttctctagttccttgaggtgtgaccttagattgtctatttgtgctccttcagaatttttgatgtaggcatttaaggctatgaactttcctcttagcactacttttgctgtatctcagaggttttgataggttgtgtcactattatcattcagttcaaagaatkttttaatttccatcttgatttgattattgatccaatggtcattcaggagcaggttatttatttattcatttatttacatatttattttggaggctgagtctcattctgtcacccatgctggagtgcagtggtgtgatctcggctcactgcaacctctgcctcccaggttcaagcaattctcctgcctcagcctcccaaatagctgggattacaggcatgtgcyaccatgcctggctgatttttgtatttttagtagagatggggttttggcatgttggccagactggtcttgaactccagacctcaggtgatccatccacctaggcctcccaaagtgctgggattataggcatgagccactgtggccagccaggagcaggttatttaatttccatgtatttgcatggttttgaaggttccttttggagttaatttccaatttctttccactgtagtctgagaaaggacttgatataatttcagttttcttaaatttattgagacttgttttgtggcctatcatagggtgtatcttggagaaagttccatgcactgatgagtagaatgtacaatctgtggttgttgggtagaatgttctgtaaatatctgttaagtccatttgttccagggtatggtttaaatccactgtttttttttgtttactytctgtcttgatgcttgtctagtgctgtcagtggagtattgaagttcctcactattactgtgttgctttctctaatttcttaggtctagtagtaattgttttataaatatgggagctccagtgttaggcacatacatatttaggattgtgatattttctggttggacaaggccttttatcattgtgtaatgtccctccttatcttttttaactgctgttgctttaaaatttgttttgtctgatataagaatagctactcctgctcacttttggtgtctatttgcatgaaatgtctttttccatccttttaccttaagtttatgtgagaccttacgtgttaggtgagtctcttgaaggcagcagatggttgttgaattcttatccattttgcaattctgtatattttaagtggaacatttaggccatttacattcaatgttagtattgagatgtgaggtactattccattcattttgctatttgtttcctgaataccttttttttaattgcttattttttataggtcatgtgagattcatactttaaacgggttccgttttgatttgtttccaggagttgtttcaagatttagagctcctttagctgttcttgtggtgctggcatggtaggggcaaattctctcagtctttttgtttgtctcaaaaagactgtatctttccttcattaatgaagcttagtttcactggatacaaaattcttgactgatgattgttttgtttaaggaggctgaagatagagccctaatcccttttaacttgtagggtttcttctgagaaatctgctgttaatttgataggttttcctttataggttacctgatgcttttgcctcatagcttttaagattatttcctttgtcttgactttatataacctgatgactatgtgcctaggtgatgatctttttgtgataaattttccaggtgttctttgagcttcttgtatttagatgtctagatctcttgcaaggctggggaagttttcctttattattcccccaaatatgttttccaaacttttagacttctcttattcctcaggaatgccaattatccttaggtttggtcattttgtcatttaacataatcccagacttcttagaggttttgtgtattttttaaaattcttttttctttgtctttgttggattgagttatttcaaaaaccttgtctctgagctctgaggttctttcttatgcttgtttgattctattgctgagactttccagtacattttgcatttctctaagtgtgtcctttatttcctgaagttgtgattgtttttaatttatgcaatctgtttcactgaagatttctccctcatgtctagtatcattttttttaatttcctaaagttggacttcacctttctctggtgcctccttgattaacttaataattgaccttctaaattctttttctggcaattcagggatttcttcttgggttgaatccattgctggtgagctagtgtgattttttttgggcatgttaaagaatcttgttttgtcatattaccagaattgtctttctggtttcttctcatttgagtaggctatgtcagagggaagatctgggggtcaaggctgctgttcagattattttgttcaacggggtgatctcttgatgtagtactctctcccttttcctagggatatggtttctggagagccaaactgcagtgattgttatttctcttctagatctagccacccagcagggctgacagtctccaggctaatactgggtggtggtggtgtggggagtgtctgcacagaattctctggtgtgaaccatctttaggtctctcagccatggataccagcacctgctccaatggaggtggcaggagagtgaaatggacaggatctgtaaggatccttagttgtagttatttaatgcactagttttgtgcctcctgccaggaggtgatgctttcaagagagcatcagctgtggtagtatagaggaggatcaggtggtgggcagggccctagaactcccaagagaatataaactttgtcttcagccaataagatgggtagggaaggaccatcaggtgggagcagcattaggcgtttctgagctcagactcaccttgggcagggcttgctctggctgctgtgggggatgggatgtgcttcccaggtcaatggagttgtttccaggaggattatggctgcctctgctgtgtcatgcaggttatcaggaagtgggggaaaggcggcagttacaggcctcacccagctctcatgcaacccaaaaggccagtctcactcccaccatgccccctcaacagtgccaaatttgtttccagtcagtgggcgagtagggctgagaacttgccctaagctaccagcctcctggctgagaaagcaagtagggctttcatgcctccctgcctgttaagtctgcataccagattcacacccttcctcgaggtctggccaggaaactttgcattcagttggaattgttaaaaagttcacctggaggtttctttctccctgtggtcttttcccagttcctctggcagccctccccaaggaccacttgaaacaagtcagaaatgacttccctggggacccagagagcccacagggcttttcctgctgtttcatccatccctgtatttcactcagttctgtaaattgtctcagatccaggtaaggtctaatccttctcccatgattgggaccttcaggttccccagtgaggttatgtgtttggggtggacaatccccctttcccactttcacagtttggacactcacagaatctgggctgtctcctgggtcctgcaggatcaatttgttcccttcaaagggtctgtgtattctcttggccttcctgatatattcctacagtagttcttggagcaaaagtccacagtatgagtctccacatgctgttttgtccatccaagtgggagctgcaatttagtccttcctcctacccaacattttttactcccttgtcatataatttgaggtcaggaaatgtcatacctccagctttgttcttcatgtttaggattgctttggtgatttgggctcatttttttccatgaattttaagatttttttctaattctgtgaaaaatgatgttggtattttgataaggattacattaggtccttaaattgctttgggcaatatggttattttaatgatattaattatcccaatttatgagcatgggatgttttctctctccctctagctgagacctctggacaaactataggtaaccagttgtagaagacagaaaataggagacatggcctgacccaaactatacaacttatgtaggctctggggaaaacagaaggttatttcaagttatttttcaagtcctacagaacctcacattggaattaacctggaaatggtccagctgtagcctccaggcattggcatatgactgatgatacatggccttagagaggggtgagagaacaggagagtgtgcatgccatcactgtggtgaccaccagttcttggaggcagaggcacaacctctgagatgagatgacctctggaaggtagagcaatatgaaagagaagagtgagaaggaatggctaaccattctcagccctccaggctagctaatgtttctatagtagcagggatgagaatttgagaaaaagcttcttcattgtcaaaatgtctgtgccctgcttcctgccttcactgtgcagattcacctctgggctcttctacttcagatggggagcacccgcttcccactaggcagacagaaaagccatagggccagctcatcctccaaaagaagcacagttccttctccatgggcaaaagtgccttatccctggtgtgtcatctctagagtgatgtctaaggtaatgaaagaagaggagaagtagaaaggtctagttgttcatcatgaaagtgaacacagattcaggcagtgggaatttatttccgctctgacacaaatacgtgttagtattgataatgagctattgggaaggggatggggaattatgtgtgtatacaagtgtgtgtgaactcacatgtaagctgggtaatggtgaccacagtctgatatacatgagtatatgtctgtgtattggtgtttctaatataagatagtgtctttctgcacatggatctgggagttctgagatatgggtactcagaatgtgagccttctgagagctgcttgtctgctgctttgctttattctcataccttgtccttagaagtcctagccgaggataaatatccggctgcaggtccatgccaataaatcttgggataaataactgatgacattgggctagtttcacagtgttgtttttggatgattcagggacatggatctttgggacagaaagttaaccttgtgattgctagtcctggaatagcctgggcaggactgggctaccctcactcttgaagggggcacactgtgaaacataaccccccattcctagtaattttccagccaggcagatgatctagatgaagaggtgactacctgcccctctagtcttctgaccacattaggagctaaaacaaaataaagtgaaaagatgcccctcactgagcattgaatgaactggctctgaaccaaagagatagaaatcccagtaggggtcactgggaaggagaatactatctgtcaaggtcagctacaccagaatcactccataagccatgtagctactgtcaccaccagttaatagaattcagagattccagtgagaagttagcccatcattcagcatcccaccttctccatttgttcatcccctattttataaactggaatgcctgcatttctgaagggagggaatacacatttttccttcaaaaaagctcccatttgtttccggcaaaatatacctaaggtatagggggatcagctgagtatgatgtcagagactctctggctatatggcgaatgctgttgaccaaagctggaaggacttcattagtcactggtgtcagggaagctgatcatcgcttcttaggttacacactaagagatagtcttcatggttcttgatgtgtctgcacattacagtcacctgggaagtctcaccccagaccaattaattatatcagaatttctgggcatgttgtctgggtgttcaaaaactcccaggagtggttgtaatgtgcatccagggttgcaaaacactgaaattgtggatcatctcattctgaaaatatgaatctagaatactcaactagatacctagatattaaaagtgaaatagtgactttttcaatggtcattatgtctcctttgttgatatgatatgttagggttaccatgtgaaactttatgatgttccgtggacatgtctgaaaactataaggtggaccaattagatttctccctcaggaatttgaagggaaactcaaaggcattggtggatatttgacctgaaagtttagaatgagttgggacaaggtagtcgtgatgagtctatggctatgcagatgtatcacgtaatagggactcagaggagattggtcaaaagagggaagaggacaaaagagtagccggagaaacaaaagagtgatgggggtgggagtaggggagcacagagaggaagacggccagtcccaagacaccttgattcctgacctttctgaagtcttttcccagattacatttcaatcagaactctaatggaaactctgatttagaaccataagtgaggaagtcaaagctccttgaagatgctgttttctctcatatcattaagcctgcctcaaatgcactttattctcctctctgtcactcaaacacctactccttttaaaagaacagtatgcatgtcactcccacctggcttccccagaacaaaggacaacccactctttgcacattctttactttcacaggattttgctccatatctttctttatttctttacacattaaatgtaattttctgtttacttgtcttctttactagattttgagctccttgaggacagaggttatatgtcatttatatttttttttactagtacctagtatagttcccagtccatagcaattgctgaatagatatttcttaattgaatacattcttaaagatcaaatggacctgagtttttgaactttctgttttctcatacacccagaaaagggttaatgaacataatacaacctttccagaattggatctgaaagtggtgagtaattttccccagtaatttcttatttaacatatttactaaaaacccttatcacaaaattctcctcttctgtttttttttaaaccaataacagtcgtttattatcattatcaagtattgcgtactgtacatacttgtctgtgctatatttttatacaactggcagtgcagtaggtttgcttacaccagcatcaccacaagcatgagagtaattcattgcactgtgacatcactaggtaataggaatttttcagctccattgtaatctcataggatcacagtcagtctattgttgactgaaatgtggtgaatgactgtataatagggctccaacgaagatcacaaaattgcttgttttccagaactttgacaaataccttttacagaaactaatataatagataaataatagtatatcattgctgttttcatttgcatttcattgattactaactgtttgtattttttcttgtttattggctgtttacttctttgtcaatttctttttttttaattatactttaagttttagggtacatgtgcacaacgtgcaggttagttacatatgtatacatgtgccatgttggtgtgctgcacccagtaacttgtcatttaacattaggtatgtctcctaatgctatccctccccactccccccaccccacaacagtccccggtgtgtgatgttccccttcctgtgtccatgtgttctcattgttcaattcccacctatgagtgagaacatgcagtgtttggttttttgtccttgcgatagttttctgagaatgatggtttccagcttcatccatgtccctacaaaggacacgaactcatcattttttatggctgcatagtattccatggtgtatatgtgccacattttcttaatccagtctatcattgttggacatttggatttgttccaagtctttgctattgtgaatagtgctgcaataaacatacatgtgcatgtgtctttatagcagcatgatttataatcctttgggtgtatacccagtaatgggattgctgggtcaaatggtatttctagttctagatccctgaggaatcgccacactgacttccacaatggttgaactagtttacagttccaccaacagtgtaaaagtgttcctatttctccacatcctatccagcacctgttgtttcctgactttttaatgatcgccattctaactggtgtgagatggtatctcattgtggttttgatttgcatttttctgatggccagtgatgatgagcattttctcatgtgtcttttggctgcataaatgtcttcttttgagaagtgtctgttcatatccttcactcattttttgatggggttgtttgtttttttcttggccatactgcccaaggtaatttatagattcaatgccatccccatcagctaccaatgactttcttcacagaattggaaaaaactactttaaagttcatatggaaccaaaaaagagccagcatcgccagttcactgcaactccaccctccgagttcaagcaattctcctgcctcagcctcctgagtagctggaactacaggttcctgccaccacaccaggctaattttaattaattatttatttattttttggtatttttagtacagacagggtttcatcatattggccagactggtctcgaactcctgaccttgtgatccacccaccttggcctccctaagtgttgggattataggcgtgagccagtgtgccctgcctaaactcactttctttaaacaatccccacgaccctgcttcctccatcttacctcagtctctatctccacttttttttttttttgtctcagatgggtcactcacagcttctagatacatataaaatatgttacaaaactacttaaaatgatttgggggttcaaagcccctctccattgttgctatatttggccatttaaacattaaggtggtgatggttgtgcccaccaccaaatttaatgtgaacccgagcagagatttgaagctccagcggggcaaacatatttcccatatatttggggaaaggatgagaagtctagaaaaaaagacatatctcacagaagcacgactgttgtatttcctttcaattctgcctcagaccccttcttctgaagcttaggtgcacgatcatgaaactctagcctgggctcaatctttgagacagatgtactgtgtttgtttgcttgtttgtttgttattgttttgacaacatccccatgaaaatgcattatgcaaatagaagttcaacaagacaagttttcattttcacttgttagtgttttcagttaaaattgttagacaattgaacagacaaacttgaaccattagggcaggagatgctatatgtgatatttgaaatgctccttgatcagcaaatatatgaaaatgtgaaaggcgaatgagaaaatgtcagtgtagggggtatgcaaggtcatgtgtaaaagtctaaagtgcccaagctgaagatcacctgtactctgctccttggagttcaaacccagacaccacttactaggtgcatgccctggagcaaggcttcctttgtaccgtcagtggtggaatgaagacacccataacggctgcttcacagggttgttgagaagatcaaatgagacaatgtctgcaggaacacgtgatatagctgttattgccatgaagtacagcaagggacaaaggaaaaggactatgtcatttcttgagtccttggcactagaggtgatgcacatccttgggtgggtggagaagtcagggaagctggtcttggtgacaaagagatacaagattccgggccaggcacggtggctcacacctgtaatcccagcactttgggaggcagaggtgggcagatcacgagttcaggagatggagaccatcctggccaacacggtgaaaccccgtctctactaaaaaatacaaaaaattagccaggcgtggtggtgggcgcctatagtcccagctactcgggaggctgaggcaagagaatggcatgaacccgggaggcagagcttgcagtgagccgagatcgcaccactgtgctccagcctgggcgacagagcgagactccgtctcaaaaaaaaaaaaaaaagagagagagagagagatmcaaaattctatgtttattgaagtgtcccaatgtcatattaaaaatttttcatagctgatatacagaattacaaattgacaacaaatatttttgtcatttatacacacacatattccctttatgtatgtgcatatatatacatatatgtgtgtgtgtgtgtgtgtgtgtatatatatgtatattttccattttataattgtaaacagatccctgatttctcattttggttcacccagtatcttaatgctgaggccctggccatttcgtttttctaaaaatagatgtgtttttctactttggtattcctcttatttttcatttatgagaaaacaacaagacagtggacctatttttttttccctcctgggtggccagaggtaacaattctttgctcattttctttgttcctgaattgcctgcgtctaaaacagtcggtgcccaactccctgtttcttctccctcttctcctcactccagcttgcaaatcccagggctgccagggctgcactgagctttgtgcccacaggagacaggagagtgtgagacagagcagtcacagttcctaggaggcccctgtggactcacagttgctgcctgctcccaggagctcacattccccaaactgaggatggtcctgggatgtggccaagtccctagtagaagcaactgctcactgggaacaaccatcatgttcctattccagaccctgctggggcacaccatcagcactgaagagggtgggaaacttcgatctttctgaatccctttcagttccaggtctcccactgggagttcctgaatagcgggaggaaagaggtaaagagagcacaccaggcagagtggagcatctccattctggggtcgcgttgttgctctttcctgtgggctgccccagaggacccagatttgggactgtgcctgcagggagtctgagaggaacctctttgccccattcaacccgttgcactggccctgttgtccacagggtctgagctccaggtcctgcatttggacctgggtggcaggatgtgacctggcactggtgagtccccctccccttccttccctttctgtcatgcccctttcattgcacctatcacagtttgttgttttaaacttacttgctgtctttttttgcaattggatggcaaaacccaggactgtttttagcactggattcctagaacaccagcagtatttggtattgtccatgactttctgaatgaatgagtgagtaagtgaacgaatgattcagttgctatttcctcctgttcactgtgctactgctgacatcaggtgcagcattacatttcatcatgacaggactgcatcctctgcattggtcccattttgtcctccccctggggaagaagccaaggatctctgtcccacccacttcttttgtcccttcctgaggctggggctgggaaagctcagcctaggtctagtcctgcggtgtctctttttctatttgagcctccctagacctttctctgcttagtgcatggtgcttttgcatcattcattgcttttaattcttgctgttagctggcctgctagccccagggtgctgttcacctctatgtcctcccctggccacctgccccttgcaaagacctgccaaaagtgaggggtgttcaggtactttccttgctctctcctctttctcattcctcaccctgctctttccctcagtaaagagctcagcatgcccccaggacactgatgatggaaattactgccacaaagaaccagggtgacagtactgctaccccctctgcattcccggtgggtgaaaaacagtcatttttctggagcagaaacattgtttcaagagtcaaaatgcacaaggataattcagttaggaggattgagagagttaatatggagagggagaaagatacaccatcaggagagaacattcaaatcctccaagtctctggaggattattatattatatggggatgtggaagctctccgctagttggcattttaacagagctgtgaactgcaaaacctgcagcatgaaggacttagaaagataaacaggatctcttctcagcaaggatccttaacaggaatgagtgaggggagctgagggcactctggggagtccaggctgcaagtacagttaacgtgggatgctgtccaaagcatatgctaaatagctaaacacagccttgactaggccactgtcaacaggctgtgcttggcctgttttgattgagcactggatggtctactggttggacaagttgagtttgcctgaatctcaggaatgcaggactcctgggcctgagagagatctgttctatagcaaagagaggctgcactgagggaaacatattctatcaaagactctgatgcagaaaaaagtctattcgacattcaagttacactttgcttatgttaacttcacttgtaactaacaatcagttttctaaaataaaaacttggaatgtaaaattattgaacaagcacgaaaagtcctaagacatactccagggacttgccctgagttgcaggcttgctgaattggaaggggtcggggggcgtattgtgactcagagtcttgaagcctcatgaagaagtgactggcatgaattttgtatgaagaaaggagcatcagtcatcaaacctgagaggagaggtgagatcttgaacagggaaaaaacaaactaagtgttaaaagtttaagtgtctggacagaggttgggaagataaatgcaagagggtttgggatgaggggtgaagggcaagggcacaaaaatgggggctgtggtggaggccagtttgaaaaggatgccagcgatgtggtatgaagctaagcctgccgcatgaactggggtactcctgactcaaagtttatcttagaatccccatttgacctctgattccaagacttgagatgttttagattggagagcctcaaaacatgatgtctctgaaacctggtagaaagatgttgctttctgagtggcaggtggcaaatgaaacacaaaataggcccatgggttgaatttctcattctggcttaggaatttatgacacctgaagaatatgaaggacatcaatatgggggctgaaaagggtgaggtcayagtctgggaagtggtaattggaggaacagcagcttcctggatttctggattgtcatggattcccaataagagatggagggctgaggactgaccctgtttggagcaccgctaaccagtcttgcaatagcatttgagactcaagttagatctttctgctgggaaagggacaccctccccatctcctacctatcactgatagtccatagctgatagtgggactttaatgcattcattcatttgccatgcattaaatagtttttttgtagatataagcatttttattcatagatataagcaataagctttgagtcctgtgttcagagattgatatggcactgtgcttgattcaacactgcagatttcacatacttgaagttttgattactacaaacaaatagatattggagttagaaaactctagattcaaatcctaactcaacatttattgacctaactcaacatttattgaccataaggattaagatccttaaacgttccaagcctcagtttttatcatctatgatatgaagttggtaacgatttcacagcatcattgtggcacgggagccagtgcatggtgggccctcagtggatggggtctagccattcccaaccctttatccacaattctataatcaaaatgctttgaatgctgaaagttctttcttaaatgttgagtcaaagcacttagacggcttaacttgttttgaactaaacatgaggccatttctgcctttatttcattgagtgtgaatatttgtgtactttgctacagaaataatagtgtgcttgattccaggatgctgccttgctggtattggtctcattttagctttctgataagaaattgtggggtcgtgattgccccattacattttgttaaagtccacattacacatacacatcatcattaaagaaaatgtgagtttccatttggcaaaactttccttctcaggactagaaatgaaaacccaacatgtgtgctcattggtttaaccaaaattgttattattttgagagagcatcttcctctgtggcccaggctgtagtgcagtgttgtaatcacagtttactgcagcctccacctcctgggcccaagtgatcctcccacttcagcctcccaagtagctcagactacaggcattcggcaccacaccaggctaacttttttattttttgtagtgatagggtctctctatgttgcccagtctgggtctcgaactcctggcctcaggcagtcctcccacatctgcctcccaaagtgctgggattacaggtgtgagacattgcacctggcctgtttaaccaaaatgtaatgagtagttacactgtgtaagacatgttgcttggtattctgaaggttataaagatgaaaaaagagccctgacactgagaaactaggaatccaggatttggaatctgactgtacacaattataatgcaaggcagatcttgttaactttcctgattgggaactccaggcaggatgacttcacatctggatgaggatgaagcttcataaaggaggggacatttgagatagtccctggtgggtgattaagaatttgccaggcaaagatggcagaacaaagtattctaagcacaggaataaaaagggaagtgtgtgaaggcaaagtggaattaacttatggagaatatcaagggttcagttcagtggtatcacaaagtgtgtgacaaggaggtgggggtgaagctatggggggtggtgaatggggagagtcatgtagggcaggagttgccagggagaatctgtgcttgatttgactgaaaaaggaagagattattgttgttaatttttttatcactaaaataatatatgaagagaattcaaatttaaatgaagagaatttggaaatgaatgtggacatatagaagaacagagggtacaaggtttcagttgggcaggaagaataagttctagcgaactaatgttcagcatggggattacaggtaatgatactgtattgtatacttgacatttgctaagagggtagatcttaggtcatctcactacatgtgaaaaatggtaactatatgaagagatggatatattaattagcttgactgtcgtaataagtttactatgtatatttctatccaaacctcatgatatacatttcatatggtttggctgtgtccccacgcaaatctcatcttgaattgtagttcccataatccccacatgttgtgggagggacccagtgggaggtaattgactcatgggggtggttacctccatgctgttctcgtgatagagagtaagttctcacgagatctgatagttttataaggggctttttcactcctgtgctctgcacttctccttgctgctgccatgtgaagaaggacgtgtttgctcccccttcggccatgatcataggtttcctgaagcctccccagccatgccaaactgtcagtcaattaaacctcttttctttataaattacccagtcttgggtgtgtccttatagcagcgtgagaacagactaatacaacagtttaaatatgtataatttcaatacaagatttttaaaagtaaactcctataacccacacccagatatagccattgttaatattttaaaatgcatccttttactctttttctggatgaagatagatggctagctagtttgattgattttgaaagtaattataaatgaaatctcattgttacaggttatttttatttatttatttatttttgagatagagtgttgctcttgttgcccaggctggagtgcaatggcatgatctcagctcactgcaacctccacctcctagattcaagcgattcttctgcctcagcctcctgggtagctgggattacaggcacacaccaccacactcggctaattttgtatttttagtagagatggggtttctccatgttggccacgatggtctcgaactcccgacctcagatgatccacccgccctcagcctcccaaagtgctgggattacaggcgtgagccaccatgcccggccttgttacagattattaaaaacagttgattgacacaataacttaagaaaataaaatataatagcagcatggtgcctggataggttggtgattgagcaatctaccaataaaaaaaaaattaagagtgttgttgcaatggttaagaggaaacagatccttgaactagggtggtggatatggataaacaaaggagggctagatgcttccagtttccagcccagatgactggggaattgggagccataaacatggcctttgcgggaggggaggactaggtgtgtatctttagatgtgttgaatgtgtggtggtggtcaatctggtggttagagatgtgggccgggactcagaggaggacaaaatccagatttgaaattcatttacattttaaagattgctttggttaaagaaggtgagatttctgaaggagaaaatagagaatttttttaaacaaagataagaaaagaaatgtggggtcatccatgtttagaaaatggcagaaagacagggagctagagaaggagacagacgagggaacccaggatggtaggagaaattcaagagtgcagggtccttgcagtcaagggtggaagtcacttcaaaaacgggttatttgtagcctgaaatgttatagagaagaaaatgttatagagaagaaaagaggatgaagattcagcaaaaaagatggaaggaaataatgtgtaaggtatctagcgcatcttctggcacagggaaagaacagtaaatatcagctattatttgaacaacagaccattacatttggcagttaggaagtgtttaccccttcatcctcagacccagccaaatgtcttgcacagagttggagcttattaagtgtgttgtacaatataatcaatgagtagaagacagaagaggaagagcttaagaatggtgataatgtagaggtggccaagtcataaatctgctcatcccagccagtaatccattcctygccccagggaaactcctgccttttgggaatgtgtctcctggggtcaactgtgcacacaggctagtgtgcatggggagccaggccagcactatggggwcctgattgagagagaggttgatggcaatctcctgctaacagttctcaacctctcacaggtgtcacatagaatgggcatcaagtgcaatgggtaactacagcattgtcagggagtttgtgctcctgggattttcttttttttttttttttttaattgatcattcttgggtgtttctcgtggagggggatttggcagggtcataggacaatagtggagggaaggtcagcagataaacaagtgaacaaaggtctctggttttcctaggcagaggagctccttggattttcttatctccatgagttccaggttctgctgtttgctctgatcctgttgatatatgtgctgatgctgctgggcaacctggccatcatcagcttcatttgccttgattcccgccttcactcacccatgtacttcttcctctgcaacttctccctcatggagatggtggtcacctccactgtggtacataggatgctggcagacctgctatccactcacaagaccatgtccctggccaaatgcctaacccagtctttcttttacttctccctgggctctgccaacttcctgatactcatggtcatggcctttgatcgctacgtggccatctgccaccccctgcgctacccaaccatcacgaatggtccagtgtgtgtgaagctggtggtggcctgttgggtggttggtttcctctccattgtctctcccacactgcagaaaacacgactctggttctgtggccctaacatcatcggccactacttctgtgactctgccccgctgctcaagcttgcctgctctgacacccgccacattgagcgcatggacctcttcctgtccctgctctttgtgctgaccaccatgctgcttatcatcctctcctacatcctcattgtggctgcagtgctgcacatccmttcctcctctggatgccagaaggccttctccacctgtgcctstcacctcacagtggtggttctgggctatggcagtgccatcttcatctacgtgaggccaggcaagggccactccacatacctcaacaaggcrgtggccatggtgactgcaatggtaacccctttcctcaaccccttcatcttcaccttccggaatgagaaggtcaaggaggtcattgaggatgtgactaaaaggatcttccttggagacccagcagcctgtaggtgagagggtgagcccttgacagggctagagagcacctgacaagtcacgaggagtagacttgctgcaggtgggcacccacatgcctaagctggagctcctcactctcttttttctcattttctcctggtccctcatcttcatgcaagtttcttctcctgcactgcagagaactaatggacacacattggtagaatgtctcaaaggcaagtttctgtgcacctgggatagttaaggaatggatagggaatgcagagtgagtacaatgggacggtcttaattaaaagagataatccaaacaaataaggctcttagtgcagggtctggcacattaagtaagagctcagtaaatgtagctattattaaaatgtcctattaaaacctttctttcttagctctgtggttttgcttgcattcttttaagtttcctttattttggatgtgtttccttttcaggacctggcttcaaggtctatgatagagttctgaaaatgggaggtgctctaagaagagcagagaggcctggcaccccaacacaggaggagccatgtgcttctgttggctcccctctctcggcctgaccgctcctggatggaagcacccctcacacccaggctgcccacttcttccatctggccccaaagcctcttgcctttccacagaaatggctctctgggagccactcctccaaccctcttatagaaagtcatgaagaccttacctttttcatgcacttgagagtgggggaaagctgagctgcgtctgcactctcagacttgctgccttccccttcccgtggggccactacttcccttctactgcagaatcttagatccaagttccagaagaaggaccagttgcccaggccttctgaggctgggtttcctgagagcagcctggccagattaccagggcccctggatggtagaagcaaaggtggtagaaatcagatgagaaggagtaaacggagtgggactggtgttgtaggtaacgtggtgggagggctgataagagaggcattcctcggaaatctggatggcgtgagaagtcatgggaagatggtaggggcaggaagagatccgggtctggtttcttttactagactgagtctcagctgggctgggctaggattagcaaagcggggcaaagagtagatgcaaacttcctctcatttctgaagctggttctgtccacaggatccctagaggagaggccctgctcataacttgcagtgtggtgtcacagtgtgggagccaccccacagggccaagactatgaagaatggtttcaggggaagccttccaggacacagagcttggaggcaccactgtcttactgtctctgccatttagcttgatctctaacatagctctttttctttttcaacccccacagtacatttttgcatttgtgggccttgccaaaagtgggcagatacttctgattctgctgtaaagaccagcagggaaaagtttttcatcctgagaacttgtctctttcacctcccaagagactaattacttgccctccttgcaaacttcctgaaaaactgaagagctaagtggaaagtaattatctccttctgagatgcagatacttttcctcagcttctcctcctaaaataatcagcacaggagtcactcagtgtcctccccagggactccttcctgctactcgctcttctctgcacattccccctcttaaaaaactaaaaataatcaatagcctatagcgggctatctcctgtttttcataggatttccttggaagtggggtctctggtcagttttggggacggtctgactagctttgggccttcatagcaatcaccccatggaatccagcatcatgcagcctgacctgccccacagccttgcctgtggttctttgctcttcaaagtgtgatgcttgaaacagcactggcatctcctgggagcttattggagatgcagaatctcaggccccacctgagacctcctaaatcagaatctgcatttttgcagatccccgggtgattcctatgcacgttaatatctgagtaacgctgagctagacaatttgctggtagagttttcaaacaataaattgtataagaaaggccttgttccaatctcaacaacgtgaagggcattggaagagggaatttggggacacatttgctattgttggatccatcattccttagtgacctttatcccaggtcccatttccggagacagtagtaaccaggatgaagaccctgaagactctcatcctagtctgactttaagcttcttgagtgacttcaatcaatggcccagcctctgactcactgttagaattctatgtggaygtcacctagagatgtctagatatattggttccagacatttgtcttaatgtggcagggatgtcaatgtgcacaatggcaaatgagactcctggatagatagaaacgaaaaaataattttttaaaaatcttgcaacttgctgggaggaatcttgggattccagttccaaatcaaagtagctgttataaaaggctcctcaggtttaagacatgatgtaagtaaaccacagcttcatggaactgcaagggagtttgtaggtcatgcaggcctgcctccctctgtctcagtgcaggcatccccactgcaacacactgatcagactggcttagggactctgcttgaaccaagtccagggatggagcatgcccagcggkgggaggcagcccctttcttcactgcatggttctaaattttaagaagaaatccttatgtcaaacctcaatgtgacgtcctctaaccttcacccattgtcccagttctgcctttttcagttatgcaggcagactagcaggtaagcaaagatatctatgcattcccctccaaaatattcaggtttacaaataggaggttgcatcaaaccgtttctagaactcttgccttctgcattgctttgtttggttcctgttaggtgcatcttggaactgactgacgtactagtgtggacaactaactgagatgtagtgcagtgggaaacctttcctcttgctctgttgactgcatttcttaccatcaactaagatggcattccatgtttaggttatcgtgctaactcatgttccaaattcacataaacctcatgattaatgacagctagcatttattgaacacctactatattctaggtacaggaaaaacaaagatctataaggcacgacacctaacataaggagctcagaatccacacatagacaaaactacattgaaccaagtccagagatggaccattcccagctgtgggaggaagcccctttcttcactgcatggttcaaatcttaagaagaaatccttatatcaaacctcagtgtgacttcctctgagttcctgaaggcaaagctcttggggaatgccccatttcttttgattaagttgaaagttaagctgaaatgactttttgaggtccaaagaacagttttataggctgagaagaggaaaagtgaattcctgagagaggcaactgagtgtgtaaaataacataggcataaaatggtatattgtgtagacaaccaaagcctaaagagacgagattaatgagtggatttctggagactggccatgggtatcatcactaatcagacccaagccccccaggggacccgtaagtgtcctctgcaagatgctgtactcactgaaataacagggcatatttgataacaacaaacttcagtgtgtacatcagtgtagaaatctctgcttgcctagggcaatcatattgtagtcaccaaaggtgctatttatcttcagcactgaaactgtattgcctttaattttgcaaaaacctaagtaagttcagagagcttagcttttctgaaatgcttgatttccctctctgccagcagctgaattagtcacatgttatacccctttaaggctggtttggtcgggtcctccaacaaaagggaggcatggggatgaggcagagaatgggggatctgccttctgtgtctgtggaggagagggaaggaaatctgtgatgtcccctctccttagatcacagccaacttcctccatgacaaggacaagggcctcatatacagtcctttggactcacccccagggctgggtaacccaagaacttctgggtgaattgtccactgagtgagggaagtggcagaaacacaagtgtgagtggtgagctgcccagctgctagtgaagaagccaagtcccctcatatatggaggatcctgtgtctatcagataaaataattcataagttcccttataagggcaattccatgagctttacctccataggacttggcaggtgtctaactcaagggaaggagaatgacagcaatgcagcattgactggggagcaggatctaagggaaacccagaggtaggatgctagtgatgttctggagcctcctggagaacccatactggggcattgctacaagactcctgagaatgtggaagggactttggaactggctaactggcagaggctggaacagtttggagggctcagaagaagatgggaaggtatgggaaagtttggaagttcctagagacttgttgaatgattttgaccaaaatgctgatagtgatatggacaatgaagtccaggctgaggtggtctcagatggagatgaggacccaaatgttagtagccaaggcaatagggaaaatgtttacagaacacgtcagagaccttcacagcagcctctttcatcacagcccagaggcctaggagggaaaaatagttaatgggccaggcccagggccctgctgctctgcacagcgtcaggacttggtgccctgcatcccagccactccagctccagtcatggctaaaaggaaagaaggtacagctcagttcattgcttcagagggtgcaaaccccaagcattggcagcttccacgtgatgtggcagaagacaagagttgagctttgggaacctctgcctagatttcagaggacgtatggaaatgtctggaaatcgaccgttaaattggcaggaattaaatacaggcatgataaaaaaaattagataacagaaactcaaaatcaaataagttatgctaaaaacaaaggtgattcatattcaaaactcctaattactttgctatattttacttttgtccatgagattgaggttatttaggccacctgtctcagtgtggtggaaatactatatggggctgcatggtggggcatctttccgtaactccaacttcagatgtcatctcggtagcttaaaactggacatggtgaaaatattgacaccaggaagttggcaaatgctagaagtcagcaaatggagagaggtggctaaacatttactatcagaccactgagccacgaccaccattcctcagtacccgtcaggcattgttgaaaaaacatatgtacatcagaaaacctagtgctgaaagaattagtgaattagattgatatgaatctagtccactgtaggcaacactgacattttcttagtttgacccagagggttttacacctcaccactcctaaaatcccatctgtgcagggtcttgatgttgctaccaaccaccgcaagacccaggcctgactttcctttgaaaagtgattatatgcctttgtcttccttcttcaaaaactttcataccttcaatttcttgctctctaatcctcccaactggaagaaataaatccatttttttggcttcccactgggatatacatgtgtgagaatggattcttgggttagccatttagaactaggatgccagacaaatgaagggtgtgtgggaggatatttggggccagggaaaacattttagtttcacgaaatcctgtcatgatttcgcccacacttaaattagttctgggtattgaaagcaaccttgccctcctaccaccctgaaattaggttccagtgtaagccacttctatgaagtggaaaggctgttgccatctgtgcatctacatccaacaaccttacatagacaaacaaccacatcaactgttctcacctcccagggaaaatgatgtcatagcaaagggactgtgaatccactgtataattaacattgtatatgaacagaatcaaaatatttattcaaaataaaaatatcttacatgtgtaggtattatttgctctatttcaaatgtttgtggaaacagtggtgataaataaaatacaaatctttttttccttctttccaacttttattctgggttcaaggggtacatgtgcaagtttgttacctgggtaaaytgcatgttgctgaggtttggtgtacagatagctttgtcacccaagtaatcagcataatacctgatagtttttcaatcctcaccctcctccctccctccatcctaaagtaggttccagtgtctattatacccttctttgtgtccatgtatactcaatatttagctcccatttataagagaagatgtggtatttggttttttgtttctgtcttaatttgcttaggaaaatggcttccagctccatctgagttgctgcaaaggacatgccctcactcttttttatggctgcatagtattccatagtgtatatgtaccacattttctttatccagtccaccattgatgggcatctaggttgcttctatgcctttgatattgaaacacaaatctttaaaagtaacattgaatctatacttgctttctgccaatatgtgtttctttcaagtgatggatactaaatgtgcaattactgtgaggaaggggttactagaattgttgccattacaaatctacaaacttgtagaatcttgatagatatgtgctcagtaagggtctagaggaggcaaaactgagcagcttcagatcctggaggttccaactttgaattaacccaacttttaattcagatggaagaagaaaattccaaagatggggagatggaaaaaaaggtttgaagaaccagatcctgctgtcggttctgcaatttctttgaccaactcattcttcctctcagccatgtttcccttacccgctaaarcgggtcgggaacaccgcttgctgcagtttcagaatcagaaattttccttccgagctctcatactctataggaaaacaccttattgaaattaaccacacttttaaatttctctcagtacatggaaccccttgaggtcagactcctcatttctttcatctttaacagccactgctgagtggagtgttttgctcatgatgggtgatcagtgaatatttatttaactgaattactatgagggtaaaaccaaatggaaaatatatgtaaaagtggttcataaagtatgaaaagtatacaaaagtaagatattgttagtagaattattcttaatttactcatccttctttcatttactctacaaatacttttctaggtagcaagcagagaataaacagaggaaaaaaacatcaattcattcaatagcaactgcaaacaacagaatcattgctctgttatgtaattaaagaacaagcaaaattttggtccagaaactgaaactgggaatgtgaaaagaccctccgacttggctaaggggtatctcagcaagaaagaaagacactttcagaaagccagagaaagggatgcctcgtttaggaaggagttagcttggggtaagaggaggtcacaaggagaaccaatgggttggtaagcaagctgcatctctcaagctccaaatgagcttacctcattcatttccacatagtggattttttaaatgcttgacatttgtgataaattagtagttttattgttttcaagtaagtgtagctacgaataaactcctggttgtagtttatatatcacaaattgggatatggagtttggtaaattaaagtgtacttacagaaacagtgtgtcaaaacaacttaaattggggctactttagaaaattctgcatgggcaaaagctaagggaacaccatgatcctgaggtcaaagtaactggaagattttaaaaatttcaggctatagttggaggagggaggacagtggagctgatgtttaactccaaaggcagcatgggacataatagattttcaagaattttatacccacacgtatgtgaatgtaatataatgttcatattttatgtaatgtacaatataatatgtatgtgtgtaaaataggatatataatcactgaataagtgaacttactaggtttattacaatcccttgcctttaggcaaatgaatgtttctaatcatacaggagcaaagtttattttgtctttctaaaactctgaatatttcctctctggaaaccacataattcctcactagcggagatttatcttgttttaatttctctctgtttcatctttctctgatgcaaaggtacctgatgaattgcactctcacagtgtccaccttatagtcaatgtgctactcaggtgtcatcttgtcaggaagccgtcgctgagcctcctcctggtctcagtgttgctcccctgtgtgctcataataccgtctgtgaatccactgttgcacgttccccactgtgctggaaacagctatttatcactttttccttccttaggccaagagctttgtcaggttaagaaccatttatgmcttttttacctttctaccctctacctgttacagtgcctgacacacacagcctactcaatrttgaagaaatgaatgaataaatggatgaataattatacaaggacccagtcctcctcccaacactcacacacacattgaaaaacaatcagtttgtttttggtaagttttgcttcttcycttgatcccatgtagcccaagcacttatggtgcatacactcagcagcagtgcatactgtgatagagaagcacacccrgaacatgcacacgcatacacacatatgtacacacatacacacccatgcacacatactgggattggacactacctcttratcatagagcacttcttggctgctcttccttaaatgcaaagcacatgcacttccctttactgaaagctctgggctactctcagagttcttacggctgccaggggatgtagggaactcttccatggtggtccataagagctttgggccagacagtgcagcactcagggctcactgtagttattgctcagagggaaaaaaactaaagaaactcagcagtgttcttcccacttgctggaggtctccctccccacagaactgctcaatggaggcaggccaggttcccctgggccctgggctcatcattgtgccttgcaaaggcctttyagcctctgcatctgcccctgtagcactgttttaactgtctgattgcagaaggtaaggataaagggattgagaaagggggtgagaactgaagtcaccaaggccacgaccttcytgacttgcacagagtgagctttgccaggcctgacatacagaaagatggtactactgtagccgatgaagaccagtgtgaggtgagacccgcaagtgragaaagccttctggcagctgctggcagaggggatccgcagcacagtggtcactatgtagccataggagatgagggtcaccaggaaggagctgaggacaaaggtcaaggccatcagaaagtcccagaattccaacaggcgagtgtcagagcatgacaactgcaggagaggttcattgtcacagaagaagtggttratgacgtcgccatggcagtaatcargatgagctygggagaggacagtgggtaccatggctaggaaaggagctgcccaggcagccccagccagctggacacacatagcccggctcatcagagtgccatagcgcagtgggtggcagatggccacaaagcgatcaagggccatgtctgtcaggatgaggaaggaggtggaccccagggaaaagtggaartagaactggaccatgcagccagtgaaggtaatgactttgtgrgggaccaacaggtctgagagcatcctgggcactgcagtcatggttaccaagatctccagcagggaaaaattgcccaggaagaagtacatgggtgtatgtaggtgggtgtcagctatgaccataactatgatgatggtgtttcccatgaaggcgagaagataaagcatgaggaaggggccatacagaagggcctgcagctcaccaaaggaggagaagcccaagaggacaaattcggagggctggctcagatttgccatgatccacagtatggggccctrcatgcaagagaaacaaaagacagacggagaggcagaaacagagagatagagacagagaaccattgaacttgaaacagaagaaacagggacagagacagagaatagagagagaaaggcaagtagccagcgagtgataaacagaaaagcagaaagaaacggcaataaagaaagataacaaaacaggaatgggagagtcaaggagaaacagagtgagggtatgagagaagtgaaagacatagaaagccattattaagaagagagaaggctggggatggtggttcatgcctgtaatcccagcactttgggaggccgaggcagggggaacacttgaggtcaggagttcaagaccagcctggccaacatggtgaaaccctgtctctactaaaaatacaaaaataagccaggtgcaggcaactgtaatctcagctacctgcaaaactgaggcatgagaatcgcttgaacctgggaggtggaggttgcagtgagccgaaatcgtgccactgcactccagcctgggtgacagagtgagactccatctcaaaaaagaaaaaaaaaaagggggggaagaaagaaaaacagaggaaaagattaaggaagaccacatggcaacagacattgacatttagggagaaaacaagaaggaaacaacagaggaccagagaaagaacagaaaaaattcaaatagagaaatacaggaaggggaggaacacagaaaaagagagggagagagagcattagtgcatgtgacccagaagcccccaaatgtaggctaatccgtctatgtcacacccagaggttgtgccccaagaccctttttaaagggtccctgcaaacctttctgagctgcctctctgaggaccctcgcttgtgcacatttctccggctatgatcatgaaattagtgaaagtcagagttttgagtccagaaattaacttcctttagaggagacctctgcttcgtgtttgcaaagatggagagcagaaagggtgcagcaggtcagggagcgagcctggaaatccaagtggctgctctcccaggacacacacagtcatcaggcttcccaacggcataatctgtctacccaagggtgctgctttgccgtctccattgcacttcccctcccgccgtggtgcaaagtgtaagctatggagttggcttgcctgtgtttgaattctggctctagacttgcttgtcacgggccgtaaatctgctcttctttgttacttactctctctgagcccgtttattcagctgtaaaataatggtattactggtacttagcctctatggtgattataaaattaaataagtaaactacttagtgcagtgactagcacatactagccaacaaatcgttgttgttattgttatcactgttcttattgttagaccgtcaatagaactcaaattttttttgcccatcatctctctacacttcttctcattgccagcatgtgtgtgtgtgaagatctttacagctttacactgtttcttggaatttcagttcactaaaagggtactttaaaacatttcaaacacaaacaaagtatttacaacacaaactgtcaggagtggaaggagtgaagctgtgtgtagatatactctggccctttctccagccccataaatgcttcatttggggttgtgtcctggccacacagcaatgacattctaattttaaaaagccttgcacccggccaggcgcggtagctcacgcttgtaatcccagctgtttggcaggctgaggtgggcggatcacgaggtcaggagttcaagaccagcctggccaacacagtgaaaccccgtctctactaaaaatacaaaaattagctgggcatggtggcgggcacttgtaatcccagctacttgggaggctgaggtaggagaatcacttgaacctgggatgtgggattgcagtgagctgagatcatgccaatacactccagcctggatgacaaagctagactccatctcaaaaacaataaaaaataaataaataaataaataaataaataaataaataaagccttgcacccatgccactggcaagccttaacggtaggtctaaaatcctaaaatctaccccagcactgactaaattcaaacscagtccttatgtttgtgtygcatgagaacctgactgacatacagacytccccccctcaccttagcctccaagcctgktgtcttctttgtaagctgctctcacttaggcattcatacctggagacacctgcctactggcctcactctataacatgaatgacatcagagatgcagtctctttcccttgggttgtgtcttgcggctggaaagggtggaaaggggctttgtgcacagcttggaagaggtggcactgctgggtgagctaaaactctgccagtccttatgctgattttctaattcagcacctaccctgtgtcactacaaagccaggggcagcagcattgatgtggggctgggagatgggaaataagtccctcaggagaccagaggggaaaggtgctgattctgtccattctctctcaaggatgagtgttttcagctctttctctcatccacatctccaagtccttcgtgtcttgatgatgtttacagttcagcttatgctggawgggaaacttagactccagcagagtgttttctgtgggaatgacaggaagccaaggagccctctggggacttctgaggcactgacgttgctccttagaataatgagatgtcctctgttttgaggaagtaacatttgagaaaaagatctgaataaagaaatggataaagacccagatacacccaagcagctgacggcttaggatcagcacctcggcagtgcctgtctcctggcccttcccctcctcccaggaccatggaaaaaatatgagatcatggaaaaaacacaaaggaattttcccagctggactaaaattatgacagcctgggtacctagccagggctggatccagagtttccatttgcagacaaaatctccaagtggatccagggtttagggatctagggaggcagggaatggaggccctggaccatagcagcctcttgttaaaattctccaaagaaagtatcatttggagaagtctgggaatcaaacagatatctgcctccagaggcagggcccttggtggacacatcttgggatctggctcctgtgagaagatacacaccctggggacaaaggtaaagggaatatggggaggccactccaagcttccagctccctagtaaactctgagtcacagtctttcatctcagagacatttaaaccttatgcatgatacccagtgcaaccccacccacactgagacagaaataatgactcaaagatttcaaggaaaagctgtgcaatgaaggtagtacagatgggccctgaggttaagaataaccagggctggaggggttgaccaggcaatctttctgtaggacttgagcttggaactgagatttggagctgacccattgaaagcaaagaagaggctgggaacrgtggctcatgcctataatcctagcactctgagaggccaaggtgggtgtatcacttgaggtcaggagttccagaccagcctggctaacatggtgaaaccctgtctgtactaaaaatacaaaaaattagcctgtaatcccatttacccaggaggctgaggcaggagaattgcttgagcccatgaggcagaggttgcagtgagccaatatcgtgccactgcactccggcctgggtggcaaagcaagacttcgtctcaaaacaaaaacaaaaacaaaaagaaagaaagtaaagaaaaatgtaggtcacaaggctagaaatggaggaggaagaagaaaggagccagttgctagcagggagctcaggtaggaagacaggtcctgggcagagcagggctggaggcaggggcttgggaattgaaaggcaggagcataggtcggggctacatgggccttcatgactattcattttctattgcttctgtagccaattaccacaaattttgtagcttaaacaacacaaatttattacctgacaaattctccaggtcagtaacttgaccaggcctcaatgagctaaaatcaaggcgtcatcagggctgccttcctttctggagtctccttgcttttccaccttctagaagctgcccacattccttggcttattgttccctcgtccatcttcaaagccagtcacatgtgtctctcagaaccgtcttctgtcatcacttagccctctgactgaactcagaggagaagtttctccacttttacaaatccctaagattagattcagcccatctggatcacccctaagattagattcagcccacctggatcgcccaggctaatcccctcatctcaaggtcttcaacccaatcacacctgcaaagtcccctttcctatgtaaagcaacatttcacaaattccaaggattagggcttggacatcgttgagggggcattcctctgcctatcgcaatgactaccatgcagctttggtgcctggtgaaccacttatttgaccagatccattcatctttacacaattgtgttcattccttaataaatatgtagcgtcaactcggttaaatgatcataacatagagcaggctccataatccaggagcataatcctaaatctgtccttatttcctttgggattaaaggcatgtggagcaatgttaattcttgtttcctttctagccttcccagagagaaagagctaggattgaaacagcgaggggaactactctagtgccactcaattctgtctcctgggcttcccaggctttgaggaactgccccatttccttttggttaacttcttctttcacttgatgagattaatgggaaatgcagtcatttacatggttgaattgatgaagtcttcagtctcccggggatttcttcctcagtcaactcttcatcttttcacacagtctattaatggacatttccattgttattgcttctttgatccagattgattcctactccagtatcccctcagcctctggccaaaaaataatccttctccactcatgcctcccatttcacctgtgtggtgattgactatgacagctgcttgtttctctacgtgaaacccaagcaaatttgggcagcagaataaaacaaggtagttttcctgtttattttcctgttgaccccctttctgaaccttcttacaggtcagatttactgacctaaatcagttttaggtgggccagtcctcatggattctaaggtaatctggaaaatactaacaaatatctaagctaaagcatctttattttcatcatcaaaccatatgtaattatcacactcaggcccttggaagtgggcaaaatacacaaacataaaaaccaacctgcttatcagtaactgataatctgagctacttcttgtttcagttgttttgtaataaaattattgttttgtttttgaaaatctgaagaagaaaatgcctgaagtcggggaagagcttgagaaaggagctgtatatgttcctgggggcgttagattgcactgtaatcatctctgaatgtgcatttccagaagaggaagagagtccagggactacaataaaaatgtcagcacctctgctcagatctgccctactgtttcctgggatatgttgacattttgacttgcattattagactcaatctcataaagctgtgcctggccattaggtgagacacagattactccctggtgtactctttttcttggatgtgccatatctaatcttggcccattgctactacaaagcaactctttttctctacattttggcataaagccaacttggagtggcacgaggacaatatgtttagaaaggggtggatggaatgtttgaacatgtttggtggtagggacagaagaaaatttatgatcaaatttttggcaactatttaactcatctcgttttgttcatggtaaaggaaggaggtaaggaaggattgaatggctcactctagatgcctgaattttttctttatatgctacaggaatcctttgttttcatgatgtgctctgcctcccaaagccagatatcctctgactgggggcttttctgccccaatctccagctgtcttctatgacatctctgcagattttcactgctggcagagttgagagtgggagtttcctccctcaattctgactyactaacaaatcaggggatggggtagctccctattaatgcacagaaatatgtaactgctagattttcagacagattggaggaagaaattatctcacatgataatacctgtaggctggaatcagacagaaaatagttttcttgagaattgatgtgggtcacctggagaattgaagagtctagcaagagggcacttgcctggtggtggatggagataggagctgaattagggcccctgagtaaaattgtgtggcttgtagactgtacaaaggtggtgatggagagactgaaggggcacatgggggctgaaggagctgcatctacctgatggaaaggggcacccattttatgcacaaagatgatacacagtacttgtgccaaaatgtcttgctttatcctcccaactgatcccagacagtttgcttagatgtctaaaacaaatacaaatcataggctttatttgatctacttgtcaaataagattgtcacagatgtcacatatggtcacttttgccatacttttatgagtccaagcaacacaagattcaagaggcaggggcatagagccatatcttttttttttttttttttttgagacagagtctcactctgtcaccaggctggaatgcagtggtgtgatctcagctcactgcaacctccgcctcccaggttcaagtgattctcctgcctcagcctcctgaatatctgggattacaggcatgcaccaacatacccaggtaatttttgtatttttagtagaaacagggttttaccatgttggccgggatggtgtcgatctcctgacctcgtgatccgcctgcctcagcctcccaaagtgctgggattacaggtgtgagccaccgcacccagccagagccatatcttaatgggaggagtgccaaaaaatttgtggccctttaaaaaacctgtcatggataagtcaacaaaattttctttttctaaggcttagactactctgtcagatatctgatcctgaatggaaagaaagacactaactcaccccactctcttttcactccccttctcagagaacaggaggctgcagtatctgaagtcaagcttgttctgatactacactgtatttcttcctttttgtccatttatgaggaaggcagacacattgccccactgggagttttatatcacccaagctgcaagcatctctgaaacataaaaacaacaaaatattactctgtytatcacacatgcacatcgcgaggcctcaaaaacatcttgctttactcccacaactgatcccagacagtttgcttagatgtcaaacacaaatacgattcatagaccttatttgatctacttgtcactaagcttaaaaaccacacagcacagtcttgatttttgcatatatcgtaatacgtctcttaaaatgtgtgataaatttttgtgtaacacattctgttaatgaatgcttatttttcagttaaccatttagctctcaaaaattagagaaaaatttattttaacaaaaaaagcaagactttttaaaaagtttctttatctgtgaggtttttcttggtaaaagaatccaagactcttggaaaatttggtaagggttatacaacttatgtttttctttacataaatattcctacatatctgagctcaaagcattagtaaatgtttgtgtgatataaaaactgatcctaaaacctgttttctattaatattctaatttttcagagtaaggaaggggtggagcaaggcaaataaatcgtgaatgatatgggctgcaatggtagacaaatgacaaatagggatgtctcctgcacctggctggaatggctttcaatccttaatcatattgacaatagtggctgcatggtggctcatgactgtaatcccaccactttgggaggctgaagcaggaggattgcttgagcccaggagttcgagaccagcctgggcaacatagtgagactccatttctacaaaaaatacaaaaattagatgggtgtggtggtgcgtgcttgtagccccagctattcaggaggctgaagtgggaggatcacttgggcctgggagttctgcagtgagctatgattgcaccactgcactccagcctgtgtgacagaggtagaccctgtctcaaaagaaaagaaacaaaacaaacaaacaaaaacattgatagtagctactaacaccagctactgcatggtagagtttgaatttgaatcagatctgatcccaaagactctgctcttaatttttatgtcattttgtctcaccaacctaaacataatccaaacttgtatatcattacattgcttattgatttatattgattatataaaagatatcttgctgattgaatgagaagaatatgagagacataggagaaaaaaatcacatgtaatgactacagatttattctggagttaacctgtgagggagaattattatattcagtttttagataacaatgtagaatctcacagagcttaagtaaatgtcagtgtttctcagtcatcacatgttggggcctgagaccgaagctctgatttcacccacttcacacactgtcctttccctctatatcatgccaagaatagtaatgctatgactgtttcagatattctgtagctcagcagtgacagaaactgtgaaactgaaattacttacattatttgataagctaaacccaaaattcatgaggaagagaataagtaaaacaaacaaacaaacagaaacccagacgtttataatggacaaataattgttcactcatatttgttgtccttcctggaggtgaccctcccagtgggaatatcacatatttttgctccattaattcaggagtggtcgagtgattttcttcagccagtgagatatgggtagaagtaatgagagtcacttcatagcaagagctttaagggttggcatttgagtcacattccctttttctccacatctgagatcatggaagaatgtgtttaaagggagctttctactgctccagtccctacagtataataatgagcagagtctacttcctggctagtgatgggcgcatggcatgagtgagaaacaaacatagttgttaaaagccgttgaaagatttgagttattggtgacttcagcgtgaccttgctgtagcagatgttgttagtgttacattctaatcccttaagtttcctttcatcgtttctgtgttaagccctatgtacctttgtggtcagagataaagaaaggccaaggttcacaggagagagccagtgtggatgcgagaaacacaaaaccagagaggcgaggtgttagaaaagcagtaatggagagaaagtgagagacagagagacacaggaggcccaggaatgcagacagaaagctagaaggaataaaaggtaacccaagagaagcagcagaagtgacaaagaaaagcagaaattgtgagcagaaggagggaggaaaggcaggcaggacacgggactgagcatggccagaggctgagcacagaagccagtctaaagcacccctgtgaggctttctagatgcccctctgctgagaactctcactcagccacatatttccagctttcagcagcagcagcaaagccattcaattcaggaagcaaggggagccagaacagagagacaataagatccctttggggtgaccatctgctacatgtttacaatggctgaaggcagaaagggaatcaagatatttagattcaagctctggaatccaggcaagacccattggatgctgctgctctgacagtccctgaaagatgtgtgtggtatgtggattgcactggacttctagctctgcttcttaaaatgctgtgactatcctagtggaccacccttccctgacatgactcactcttgtatgggggctgacggcacagaccttggaccgtctaggtttatatcctggccctgtgaattgccagttgtatgaccttgggctgatactaatcctcttggagtggaattttccccagatgtaagataaaaaatagtagagctagcgtgagcatcaaattggattatggctgccacataggaagagttcaataacagcagtttccgctgttgttattggcatggaaacttcattctcatcatctccccttctaacccaaccgccaaccacacttctttaacgtgaaggtgatgggtttgtgtgtgtgcgtgtgtgtgtgtgtgtgtgtgtgtgtgttgatgcatctatgtatgggtccagcagtgtgctggctgcacactttaattatagttaactgaatgaatacctttagagatccataagtagtaaataaaatcagaaatgagagcacacaaatgaagccctgagaagacacatgttagctgtctctctggaaccacaggtatttcctagaactgtatcctggccatcagcaatgacatctaatcacagaagtggatctatctccctaagcagtaagcatgcaaccctctcactaatcttaatgccaagtctaaactcatcttgactaaccgaaaccgaatccttataactcattcattctccagacccagccaatgcatcttaattcataagtccagcatggcgagcttttcttattaggtcatttacttcggcggcttcctgactgtggtacccagattttgacacggagacataagccccttgggaatggggcaagcaaccctggccctgctttgcaagtgactccacaagttagaatctgtcagcaactttcattgagtctgtgatgaagagacttactgtttctccctatacagcccagggcagcagtatccatgactgatgtcaggctggagatagcatggaggtggcagggaaatccaatgagaatgattctcttgctgttctttgctcccagggatgatggtgctgttcacccactctgttttgaaacctttgggtcttgctgattttaagaaatgagctgggccaaatgggaaactttagactccagcagggtgctccttgtgggaacaagggaaagccaggagtcctttgggttgtacaacgctgatgcttaaactaacaatgggtacagtcagacagcaacaagaggcagatgagaactgggtccagcacctcagttgtgtgtgtgtgtgtgtgtgtgtgtgtgtgtgtgtgtgtgtgtggtggggggctttggagttcgacctgggtttgaaatgtaacatttacatagtagttgttgactaagcattcattaagtaaatgtaacgcagataaaaatctggaattttattcaataaaaaatccccaatattatggggatagtaatgcctccctcataaggttaatttcagaattaaataaaacatgttatgtaacacactagtacaggtcgtcttggggtatagaagagcatggtagatgttagtaagctgacaagagcaagctaagtttgtttagcaatgctcttctccagccctttcctgctgtctggcctcactatcccagtgttacaggatggaggagagtctgaagcttcaggatccccagctgtgaggtccccttccccctttctccactgctcagtcccaaggggctgtgtctccctggcactccagcaaccatcccagacactgacgttgtcataaactgcacacttacgctcatggatcctcttcatcatgtccagaggcacatttacttatcattattgataaggacatgccacactcattgctgaggtatttattgagcttttactgtgttccagtatgtaacttattcaccttaaagcatctgtctttgattataagactgctgatcttcaaaagcacatttgtgagtctcagaatctcagggttgccaggattcttgaaggtcactccactcaacctactggtgcttcattccctgctgacaacagctgactgcctcctgtagaagggtggtctaggagttcccggtcactcatgtcaactcagctagtaaactgcagcatgaccttaacaagtcactcgatttctgagtttcaggcttacaatatgtaaaacgaagtgttggaaaacattatctttccattgctgatattctttggcccttattaatatcatagtcattctaatctcttgtttctccacatccaaatatggatgmcctctgtgtcccaacccagatagaggaggaggtattttttttttgccatggcaggcctctaagtttgttttttgggggctctctctctcttctcccttccttgtcaccaccttccctttgtcctagaaatatgtattacattcacagaatatctggaaaaaccaaaaccctggatctataccttatgcttccaaaaaataataaattcccgatggctcaaacagacttaaatgtaaaaagtaaaaaatgggattttttggtttgtttttaatttccttggagtatgaacataggcttttcaaaggaaaacacggatcccgggagtctaaaagactgttaagtgtaactgcctaaggatgaaatatttatgcaagatagaaacaaaacataaaaacagaaacatgaaataaagatttgtttgatttatgcaaaatgttctcttacaaacctgtacattcattaaagaaaactgcaaatgattttttaaacatgaaaagaactcaatctcactgtaaattaaaaaaacaaactttaataagaattgtttttgaataactgttattttttagacaatgtactgaagatacagcagtaaacagagtggacatggtctccccactatggagcatatttgatgaagaccgatgttaccatacgctataaaaccaggtaaacacacacacacacacacacacacacacacacacttacaaaatagtgagttgttttgagcaagaaactacgtggttgtcttagatctgggagtgatgagggagaagatgtttggacagacctgtgatgaggtcacaacagaggcttaaatcctacggggagctctgagctaggacggctttccagagttgtcctgaattgtgcccagagttgtcctgaacagaaacttggggcctgggcattatacttctgcatccataggccattggatgcaggctaccttagaggaagggctataatcttggggaaggtgtttctctttgattgggagcaatttgggggtaattagcatcttggttctgaatgggagtccgggcagcgcactgcagcatttactgtaatatctggaaagcccctggcagggaacctgaacatggatatgtctgtgaggttatgggaagcatctataggagtaatcattaactggtatctggtgctaactaggcacagcatggtgggaatcacaatgagcactctgagagatggagcagcgtgccattacaggagcacaaaggatgtcagtgtcactgagcagaggagtgacacaagatgacattagagaaaggtatttctagaaatcatgcagagcctcacaggtctcaggactttaaccaaatggcagagagaaaggttttaatccggggagagacctgatctagtctgtgttttaaaggatcacgcaggctgctatggggagaacagagtagacagagggaagcgagggtagatgtgaaggtcagttaggaagttttgtggcaggtcagtaaggtttgttccttctcatttcctgttttgtgggtaatgtctctgccactggggtaataatcctatctctaataacatacattattaatgcaaccctatatagtggataggtaataaccctatctgttctactagtttgccagaatgtccttttctttctctgggccatgatgacttctcttacctgtgtccgagtatacttatgtgggaaagtcaaacatagacatggaatggccttgagcttaaggatattcagcaaacacttctactcacttgtaaaatcattaatctaggataagtttatgtactagatctggtgtggactgtaatggcccatgatgttatctagagagaactgattcagacaaaaatgttagctttgtggaggagttccatccaaagagtcatgagtggagagtcctcatgttggactgagaggctcaggtcaccattaagaagaaagcttgaaaactagctccatggctgggcgcggtggctcacgcctataatcccagcactttgggaggccgaggcgggcggatcacaaggtcaggagatcgagaccatcttggctaacacggtgaaaccccgtctctactaaaaatacaaaaaattagccgggcgcggtggtgggcacctgcaatcccagctactcaggaggctgaggcaggagaatggcatgaacccgggaggtggagcttgcagtgagccaagacaatgccactgcagtccggcctgggcgaaagagcgagactccgtctcaaaaaaaaaaacaaaaaaaaaactagctccatttcggccccttgactttcacaaggtaaaagtggaagaaaaattacacatcatgcccatcaatgccctgatatttcagatgaggggtctgatatttcaaacctagagggctgaaaattcacaccaagtatcacagagctaataagtatgagaaggaatcagcactcaggtttcctgattccaatttcaatgttttattcatgatcttacgctattttgaaatttttccactttcaccaaagatgtacacttttaaattgtgctctcaatgttatgggctctactgacagaaaatatctgtcttcgtttttacaaagaaaatgttctattcccctaagaggtgtttgcagaacgttgcttagaaatgttttgatagaacttagccaaagagacatctgtttggggaagggtctgaaagctccttgccacactcagacatctattagggctagataagccattttctcttcatgattcctcatttgctctcccatcctcatctctacctccacccaaaagccataatctatttaactcactttgcctacttattctaattgctttctgactcactccaatgctatctttatccttcacctgcctttacctcatttgtgtcctcatcaggcccccaataacaagccccatcctctgttatatattttggatttctttttattttattttattttttaattttactttaatttctgggatacatgtgcagaacgtgcaggtttgttacatgggtatacatgtgccacggtggtttactgcacctatcaacctatcatctaggttttaggccccacatgcattaggtatttgtcctaattctctccctcctcttgcccctcaacccccaacaggcccccgtgtgtgatgttcccctccctgtgtccatgtattctcattgttcaactcccacttatgagtgagaacatgcagtgtttggttttctgttcctctgttagtttgctgagaatgagagtttccagcttcatccatgtccctgcaaatgacatggactcattcttttttatggctgcatagtattccatggtgtatatgtgccacattttctttatccagtctatcattgatgggcatttgggctggttccaagtctttgttattgtaaatagtgctgcaataaacatacaagttcatgtgtctttatagtagaatgatttataatcctttgggtatatacccagtaatgggattgctgggtcaaatcgtaattctggttctaggtccttgaggaatcaccacactgtcttccacaatagttgaactaatttacattcccatcaacagtgtaaaagcgttcctatttctccacatcctctccagcatctgttgtttcctgactttttaataattgccatcctaactggtatgagatggtatctcattgtggttttgatttgcatttctctaatgaccagtgatgatgagctttttttccacgtttgttggccgcataaatgtctccttttgagaaatgtctgttcatattctttgcccactttttgatgtggttgtttttttcttgtaaatttgtttaagttcctagtagattctggatattagacctttgacagatggatagattgcaaaaattttctcccattctgtaggttgcctgttcactctgatgatagtttcttttgatgtgcagaagctgtttagtttgattagatcccattcgtcaattttggcttttgttgtcattgcttttggtattttagtcataaaggctttgcccatgcctatgtcctgaatggtattgccttggttttcttctagggtttttatggcttggggttttacatttaagtgtttaatccatcttgagttaatttttgtataaggtgtaaggagggggtccagtttctgttttctgcatatggctagccagttttcccaaaatcgtttattaaatagggaatcctttccctattgcttgtttttgtcaggtttgtcaaagatcagatagctatagatgcgtggtgtatttcagaaatatgttttgatatcagtaccatgctgttttggttactgtagacttgtggtataatttgaagtaaggtagcgtgatgcctccagctttgttctttttgcttaggattatcttggctctatgggctcttttttgtttccatacgaaatttaaagtagtttttttcaaattctgcaaaaaaagtcagtggtagcttgatggtaatggcattgaattctataaattactttgggcagtatggccattttcacaatattgattcttcctatccatgagtatgaaatttttttccatttgtttgtgtcctctcttacttccttgagcagtggtttgtagttctacttgaagaggtccttcacatcccttgtaagttgtattcctaggtatttattctctttgtagcaattgtgaatgggagttcactcatgatttggccctctgcttgactactggtggtgtataggaatgcttgtgatttttgcacattgattttgtatcctgagactttgctgaagttgcttatcagcttaaggagtttttgggctgagacagtggggttttccaaatatacaatcatcttatctgcaaacagagacaattttacttcctctcttcctatttgaatgccctctatttctttctcttgcctgattgccctagccagaacatccaataggagtaatgagagagggcacttagtgctataaatttccctcttaacgctgctttgtctgtgtcccagagattctagtatgttgtgtctttgctctcactgatttcaaataacttctttatttctgccttaattttgttatttacccagtagtcattcaggagcaggttgttcagtttccatgtagttgtgcggttttgagtgagattcttaatcctgacttataatttgattgcactgtggtttgagagacagtttgttatgatttccatccttttgcatttgctgaagagtgttgtacttccaattatgtggttgattttagaataagtgctatgtggcactgagaagaatgtatattctgttgatttggggtggagagttctgtagatgtctattaagtccacttggtccagagctgagttcaattcttgaatatccttgttaattttctgtctcattgatctgtctgatgttgacagtgggctgttaaagtctcccactgtcattgtgtgggagtctaagtctctttgtaggtctcttaagaacttgctttatgaatctgggtgctcctgtattgggtgcatatacatttaggatagttagctcttcttgttgcattgatccctttaccattatgcaatgcccttctttgtctttcttgatctttgttggtttaaagtctgttttatcagagactaagtttgcaacccctgcttttttttgctttccatttatttggtaaatattcctccatccctttattttgagcccatgtgtgtctttgcacgtgagatggatctcctgaatacagcacaccaatgggcctcgactctttatccagtttgccagtctgtgtcttttaattggggcatttagccaatttacatttaaggttaatattgttatgtgtgaatttgatcctgttatcatgatgctagctggttattttgcagattagttgatgcagtttcttcagagtgtcattggtctttatattttggtgtgtttttgcagtggctgttactggttttgcctttctatatttagtgcttccttcaagggcttttgtaaaggcaggcctggtagtgagaaaatccctgagaatttgcttgtctgtaaaggattttatttctccttcacttatgaagcttagtttggctggacataaaattctgggttgaaattttgtttctttaagaatgctgaatattggcctcctactctcttctggcttgtagggtttctgcagagagatccggttagtctgatgggctttcttttgtaggtaacctgccctttctctttggctgcccttaacattttttcctacatttaaaccttggagaatttgacaattatgtgtcttagggttgctcttcttgaggagtatcttagtgatattctctgtatctcctgaatttgaatgttggcctgtcttgctaggttggggaagttctcctcgataatatcctgaagtgtgttttccaacttggttccattctccccgtcactttcaggtataccaatcaatcataggtttggtcttttcatatagtaccatatttcttgggggctttgctcattcattttcattttttttctgtaatcttgtcacaccttatttcagtaagttgatcttcaatctctgatatactttcttctgcttgacagatttggctattattgatacctgtgtatgcttcaagaagttctcgtgctgtgtttttcagctccatcaggttatttatgttctctaaattggttattctagttagcagttcctgtaaccttttgtcaaggttcttagcttccttgcattggattaggacatgctccttttgctcacaggagtttgttattgcccaccttctgaagtctatttctgtcaattcatccatttcattctctgtccagttttgtgcccttgctggagaggagttgtgatcatttggaggagaagaggcattctggtttttagaattttcagcatttttgtgctggtttttcctcatctttgtggatttatctgcctttcatctttgaggttgatgacctttggatgaggtttctgtgtgggggtcctttatgttgatgttgatgttgttgctgtttgttagtttttcttctaataagcctctcttctgcaggtctgctgcagtttgctggaggtacactccagaccctgttcacctgggtatcaccagtggaggctgcagaacagcaaagattgctacctgctccttcctctggaagcttcatcccagaggagcaccggcctgatgccagccagagctcacctgtatgagctgtctgtcgacccctgttgggaggtctctcccagtcaggaggcacggggtcagggagttacttgaggaggtagtctgtcccttagcagaactggtgtgctgtgctgggagaattcctcttgttaggatcagctgctctcttcagagccagctggcaggaaagattaaatccgctgaagctgtgcccacagcctccccttcccccaggtgctctgtcccagggagatgggagttttgtctgcaagcccctgactggggctgttacctttctttcagagatgccctgcccagtaaggaggaatctagagaagcagtctgtccacagccactttgccacactgtggtgagttctatccagtccagacctccctgctgccttagcactgtcgggggaaaactgcctagtaaagcctcagtaattgtgaacgcccctaccccaaccaagctggatcatcccaggtcaacttcaggctgctgtgctggcagtgagaatttcaaaccagcggttcttagcttgctgggctctgtgagagtgggacacactgagtgagaccacttggctccctggcttcagtcccctttccaggagagcgaatggttctgtattgctggggttccaggcaccactgggatacgaaaaagactcctgcagctagcttggtgtctgcccaaacagccacccagttttgtgcttgaaacccagggccctggtggcgtaggcacctgatctgcagattgtaaaaactgtggggaaagcgtagtaatccagctgggtagcacagtccctcatggcttcccttggctgcaaggagggaggtcccctggcaccttgcacttcccagctgaggcaatgccccaccctgcttctgctcaccttccgtggactgcacccactgcctaaccagtcccaatgagatgaactgtgttcctcagttggaaatgcagaaaccacctgccttctgtgttggtcttactgggagctgcagaccagagcttttcttattcagccatcttggccccttgtttggatttattttttacaaaatattttcaactctattaagattaaattttgtacaacatctgtggccatttattttacttttaaagttttaatggtacataataattgtacacatgttgggggtacatgtgatattttgatatatgtatacaacatgtagtgaccaaatcagggtaagtgggatatctataacctcaaacgttcatcatttctttgtgttggggaaattcaaattcctctcttctagctattttgaaatacacaatagatagtcattaaacttgtcaccctactatgccacagaacactggaacttatttcttctatttaactgaaattttgtaaccactaaccaaactcttcctgtcttcccctcccctatatcctttctagcttctgttaaccattattttattctgtacttctatgagatcaactgttttagtttccacatatgagtgagaacatgtggtatttgtctttatgtgcctggcttatttcacttaatggaatgccctccagttttctccattttgccacaaatgacaagatttcattccttttaatggctgaattctattccattgtatatatacaccacattttctgtgttcactcatccattgatggatactcaagttgattctatatccatatttgtttttgagttggttttggtcatttttatctttcaaaaattttccatttcatcaggcttgttaattgatttcccttttaaggtgtcttgtttttattctcttcaacttaaaattaaaattttaattatgcctttggcttataacaggtcaggaaaacaagaccccttctattacacagtcttagtaattgtgtgaatcaatacaaaatgtttggagtgtaatttggtgccaataaaaagtaatagcttcaatacatctgcatttgacccagacattccaactctagggaatcttttttttctttttcagaaatataattgtttatgtacttacatgtatacgtacttactttacttacaagtacatgtttatgtacttacaaatatctaagaatatttatagcatcattttttcataattaaaaatggaaacaacaatgaaaattaattaataaatgtctatctaataaagaataggacatccacataatggaatcctatgttaaaaaaaaaagaggtagagtaatatgtgctgacatggaaagatatattttatatgttgttaaatgagaaagaaaaggttgcaaacagattttcacagcctttacgaaaaagaatatggagatacatgcttggaaaatttctctaaaattatatggcaagtatttgggcttgggcaatttaaggaattggaagaaagattaatcccaatttatacccttaggcaccaattgaaattctcagatttaacaggtgtacttaaaatacttaaaatgaaaacaaaaatgcagacaaatgttttgtaattcctactttttctgtcttactccagcattagacagatttccaacttacattttgtcagttcctccaggttgcaaacagaactgtgtacataagctgtccttatgctctctctactttgcagtggtccagctggtaatcagggacatgccataggaaaaaaaaaagtctggaagaatcttgctggaatgcatacagatgcacatatatcaagaggagtgaaaacctgagacaatagaacagaatagagttcgatttaggggagggacctcttacagtattctgtagggtccacaggactaaacgcaggagcctttttaaaatgaatgaaggagtcatcaggctttttagaagatatttggtgaagttaaggctttgaccaagaccaatatgcagacttttttgggatattggtgcatgttttagaggccaattgtggtgtctcctactgggggaaaagggttgatttaggctccgaataactagagaaacttgagaaaagcctaagataaacgacagaggtagttgactgtttagaatctgagacatctggaaacctagacctgaggttttcaggaaggcagccccagtattaagaagtccctgattggtaagatttcaggttttcccgtcaaacaaaaactttcaaaagttctaaaacttaattggtcaaaaaatgggaataacttaaagtttgttctgctcccactagactgattgcctggggactccctgaacgtgggctaattaagaagtagtaactcggtgattaagtacccttgggaagaagggaagagggaggagaggggagagagagaggaccctcaactttgcccaacactcatttctgggctttttcctaagctcctctgggaggacatttcccttcttcgccatgagtggggattgcagcaacttgttctggcccctgtgcatggctcagcactagcaggacaggaggtagcctcagcggagccctagagaacatcagaagaggcggcgaagcccctctgtaaaggtgagtgtctttccaaggggtctcctctatgaagaagagggtaaaagcattttaggatgggacatcctgggcctgcctatcttctagaacaaagtcacccagatattgaagtgtgggctaggggagcagtagagtgtataggctcatctccagacccttcctgcatagcagagagcacttccggctcctcttggacccaatgctaacacagtcacggctccctgacagtcggtgtccttctcgctcatgtttcttcatctcgtgctggttatgcagaggttgtggaaaaccagaacactgagctttcccatcaattctgtccctgaagctttttaaaccattagtaaaacagtgacgtagacagggaaggggttacctaagcaagggaagggcaggagggaaaatggtaatgtgaggcaggaaggaaaaccaaccagaataggattgagggaatgtggcccaggccctggccagaacaagtattatttaatcatatattatccatccatccatccatacctcatctagcaaaatttgtcagcactacttattttatgtatatgatacatatatcttatgtatttaaatatcttataaataaaaaatatatgtatattttatataatataagatatatttcatatatcttatttcatatatcttatataaataagataaataatataagataataatataatataaggtgtggtagttagctgtgtgagtgatgaaatctgacagacctaggttcaaatcttgactcacacagctattagttcggttaccttgtgataaattaatacataatttaatatataagatatatctatgatatattcatttcacataatgtatctgtctatatctatataaaagatatatgatatatatatataaaatatataactacttaatttatgtatgtacattttatgtgccagcctcagaatacaacagtgaagacatgtcctagccctcatggagtttatattctaatgccgttgataaataataaatacacttaaatttcctctccttctttcttgcttatttttttccctgtgacatgataagcaaactaaactattgcatattttacttaggtgtcttgtgtgtggtctagcccccacctcttccttgaatataagctccacagggcatggaattttctttgttctgttcatgactacatttgtttattgttaaataaaggaatgaagtaaataattagacataatacaaggtaataacaactgttattaaaaaaatggaagtccaataataagtgtgtcttttctgttttgggcagagtgattggaaagagtctttggaaagggtgacatttgaataatggaatgaagcgacaggcagagagccaggcatccttaacagctggcggtcccagatctattccttttctgtgccaggtgccatctttccttcctcccacaactttggaaggaaaatggaattagagaagaatggatctgttctgggaaattatcccaagctctagagttctcatttagagatcttgctgttctgtaaaatggagattttaaaatctggaacagcagagatgttagtcttacatcctctgcctcctttctgctggccccaaaggtgggtctatgcattaccattacagatgagagctggggtttaaaattctgtcctttgaacatcatataaaatgcctttgtgtcatcttgcacagttaacctaagagaaagtaactccaggaccggagggacctgattgactcacctttaaaactggcctatttaaaaggtcttagcctctgcccccgagagaaggtatatttaatggggaaaaaggcaaggaaggtatttcaccaccagtagaagaagatgtcttcacccattctagggggctggttacacagggaagtgagagcctcacttgtagacttgggatgacaacatgtacctcaagctatgtatgtgccgaccacagtagcagggacatgtcacctgattctcaggttggaaatagtttcttaacctaatttttcttccttctctcttgagagcaggaccatgtggagcaatgccacctctcttttaatctctgggcttcaaaacaagcagaatcaaggactaaatgatggacaaccactctagtgccactgaattccaccttctaggcttccctgggtcccaaggactacaccacattctttttgctatattctttttcttctatttagtgacattaatgggaaacacggtcatcattgtgattgtctgtgtggataaacgtctgcagtcccccatgtatttcttcctcagccacctctctaccctggagatcctggtcacaaccataattgtccccatgatgctttggggattgctcttcctgggatgcagacagtatctttctctacatgtatcgctcaacttttcctgtgggaccatggagtttgcattacttggagtgatggctgtggaccgttatgtggctgtgtgtaaccctttgaggtacaacatcattatgaacagcagtacctgtatttgggtggtaatagtgtcatgggtgtttggatttctttctgaaatctggcccatctatgccacatttcagtttaccttccgcaaatcaaattcattagaccatttttactgtgaccgagggcaattgctcaaactgtcctgcgataacactcttctcacagagtttatccttttcttaatggctgtttttattctcattggttctttgatccctacgattgtctcctacacctacattatctccaccatcctcaagatcccgtcagcctctggccggaggaaagccttctccacttttgcctcccacttcacctgtgttgtgattggctatggcagctgcttgtttctctacgtgaaacccaagcaaacacagggagttgagtacaataagatagtttccctgttggtttctgtgttaacccccttcctgaatcctttcatctttactcttcggaatgacaaagtcaaagaggccctccgagatgggatgaaacgctgctgtcaactcctgaaagattagctgttctgtaagtcagttttaggtggtccaagcctcagggttaattattaagtcacctagaaaattctaactcctcttttctcttatcctctcattacaaaagtcaaagagtgtgtacaattcgccatcacaccatggaagtagattaggctggtaataatgaaatccattgtctgtccaggagactctcatagccttagttcctgcctgtttccactgttgaacatattcttgtgatttgggggggactagagaaaggaaatgcagacatttttgtaagaattctattagcccaactcatttcctcatagtccatctctgaaaatgtattttctggggaagggaggaagtgtggagggaggtgtactgagaaaggtgtcctaatcagagtagaaaggtagagatgctcactttggtccttcatcacctgttgctaagttcttccctatatttttgtgcaattttttggcaagatggccatatgcattttagatatcctaaagctctttctctctgccccattgatactggaaaggaagtgtaacactgtttacgttttgtcacagaaccagtctagaatggcgatatgaggattggaatgcttctcattcaggagatatttgtggtgtaaagaagataaaaatatttgaggataaaaatggaggaaaatttatttttgttaagcttcagcatattcctttcactgcccttctttgtggtgagtatagggacaggggcaaataagaactaaatgactaattctagagagcatcctgtattttatggctgttaaacacaactatgtctgttcagactgtatccagatctagacttcaaactttataatgtcttttgattctccgtctctcaaatccaacagtctcagtaccatcatgtgtatcttctctgtgggcagaattttttaaaaataagaggccattcttttgactcccggctttctagaaattatagggattggctgtttggtagtgtaactgttggaatttcacataatattggaagaagtccttataaggaagaagtttacctaaacaacaacaatcagcagattctaccagccctaaagtaagtgagaaaattgagctgttcagcagtgggatgatgaggctactgagaattttgaagagtactgtgtgaggatgccaggttgtcttgtcctgtgaggagtgataaccgtcatgtatgtttgggtagtttgcattgcattaaagtaccagacaaggtggggaatgagctttaaattcagccagcccatgctctgcaagccaaccaatggactctggtggcactgcattggctggagaaaggggagacttttgcttaaacaaaggtgcccatggtttccaagcccagtaaatgaggatctgttctgaccagaaagaataccttttttctaattcattaatccagagaagtatcctttaagagatgagacaatagaagctcagagaatttaaataacttgccaaagtttacttagccatccactgtatcacatccatcagattggaaaaacataaaactctgagaatactaagtattgatctgaatgctggcgaatagggtttttaaaaaaccaacttctggtagaaatataagatataagatccaaataattagatagtagatgtctataattaggttctagtatagtcataataagatagtggtagtccattttgcattgctataacagaatataaataataccagcctggattatttgcaaagaaaataaacatacttggcttatgattctggacactgaaaatttatttggcttatgattcaagagcataacaccggcatctgacaagggccttggtgctgtgtcatcctatggcagaaggtggaagggcaagagagggccagagtgagagggcaagagagggccaaactcattttcataacaaatccactctcagaataacaaactcactcctgtgaaaacaacactaattcattcatgaggggatatccctcatgacttaatcgcctcttaaaggtcttacctctcaacaatgtcacaatggtaattaaatttcaacatgagttttggaggggacgttcatgtcatagcacttcacccctcattctccaaaagtagtgtccttctcacatacaaaatacattcatcccttccccatagctgctaaatgtcttaactgattccagcatcaactcaaaagtccaaagacggccgggcgcggtggctcacgcctgtaatcccagcactttgggaggccgaggcgggcggatcacgaggtcagcagatcgagaccatcctggctaacacggtgaaaccccgtctctactaaaaatacaaaaaaaaattagccgggcgtggtagcgggcgcctgtagtcccagctactcgggaggctgaggcaggagaatggcgtgaacccgggaggcggagcttgcagtgagccgagatcgcgccactgcactccagcctgggcgacagagcgagactccgtctcaaaaaaaaaaaaaaaaaaaaaaaaaagtccaaagacaagtgtctcatctaagtcagatatgggtgagactcaaggcacgatttaccccaaggaaaatttctcttcatctgtgagcttgtgaattaatgttacatctttctaaaatatgatgtaagacaggcatagaatagacatttccattccaaaagaaagaaataggcaagaaaaaagagttgactggtcccaagtaagtctaaaacccaatagggaaaacaacattaagtctttaagctggaaaataatctcctttgactccatgtcccacatcctgggcatgctggggttggggttgagccctcaagcctttgctgtggtcagtcctctcagcagctctcacaggttagagtctagtgcctgcagttctcccaggctggcattgcacactagtag

SEQ ID NO: 97071 - DNA, 13871 bp, Homo sapiens
cttgaatctcaaacatggggatctgcttggtacccagagctctggtcattgtgtccaaccacacaccccaccccatccgtgtcctccatctcacccagaaccacagggtgcccactagtgtcagggcccaaagtgccagccttctcttctgccttacctagtctacctatttatttcctccactttttatcttaaaagtagctaagccatgctggtgcccatactccaagcaggctgcctcagctcagagaagtggtcagagagtagagcacagaacctgtgatgtggggacatttggttttcttgcagatcatttaatgaatcctcaaggactaatgaaataaatgctagactgctgaagatgagtacaagtggcattctgggtgccagctgctttcttcttttgaaaacaaggccatggggacccatgggcacagtgtatatgccttctggcaggagaggactgatggaggaatgatgtgggtgtgtggccattcccatgtctgtggaggcggctggtggcagccttcattcccttctgcagggccctcgccagcccctccctacccttcaagaacccccaccccagcttccactagtttcaacataattcacacctacctggtgttactgaagggaaagacccaggctcaaagctgaatgccaccagccagggcccaagcttagcttcctgcattggcagaatgccggcttcaggctctctcagaccaaatttggaaaccggttaatggctttggtgcaagggatcagctccctactctggtcatctgaaaacctcaactcagaggtgacttggttttagagtctggcttcctagtgaccaagcagagccagacctgatctccttgcctgccagtcccagctacagagctgggaccagggacatatttgaagtacaactggagcagaggcaggagtaactggtaatatctgacaatttagaatgcagaatgtgatgggactggaattacgattccgcacacactcagcgtggatccttctgccagacccagttagccccagtgctgtttacccagactgggcactgcttctgtaggaactttccatcccagggggtggggtggggaggggctgaagctttgggggagtgcaggtgctgtgggggtcagcactcctcatgctgctcccgtgctgcctgattaccgcacaggcatttctggggcagccctgctatgcaggatctccgaacatcaagggagatgtcagcgcctctgcttagcaccaacgttcccacaaccatcccaagaagcacctatgaatgaggcacacccagaaaagaaatgggtaagatcacacaatgaggaaatccaggctggggaaagaggtttaatatcccggtacaccgtggtgagaagcctgggcaaagcatctgcacagacaggtgtgtgtggttgagcccaccaggtcccactttctctcatcccagtccctccctaaggtgctgcctagaattctgcacacacattcttactcccccaaagcacagggctttcttccagattgctttttgaaggaggcgtttaaaccagaagggcaaagatgctgacacagagtttggtttttattgttatgtgtttggctgggtgcagaactgccctcaccacccctggccaccctggcctcttgggaggaacaggcagagaggtggcttcagatggctcttggctgccactctaggcctcggggcttatacaatgagcagtgggctctaccttccaataggaagtgcaaactaattcgaagtcacacttcaccaggagggagagatggtcttggctgaaggcactttaatcagggagcaaacccagtgccggagtttgtcttctcgttactctgataaatctagacaccactctgttggagaaccagcactgccggcagctggggttagtgcactgactgagcgaggcatgaggcctgctcactggtagaacttcttgttagggctgttagcatggtcagctagcagctggcatggggtgaactgttttccataggcagcttcatatttcttgagccggtccactatcttctgggcgccatacagatccacaaagcggaaaggccctgaatagagaaagaggacttcgttgaaggagacgcaacacgggctccaggctaaagtgagcttccttcccaacctgcgagaccaacctcccagacaaggcgggaagccaagcccaaagacggctccgatgtctccctctgcaggtgtggccaagatcccctcttgcaggcacatgactgcctcattcacaaatcttgtcaccaggcggaactggatgtcttcgtctgatgagctgccaacagaaagagatgtttaggtagaagaagaggaaaaggggaggaaagccagagccgcagatgcagaatggaagtcgggatgggtgcatggggagctctgtgggccggttggtgctggccctcagagaagatgctgcctgggtgaaccaaactttcccatggaaaaagtggagagtaacttgccctaattaacatgaaactgagcacctagaacagggcctggtgccgagaagataatcagtatctctttgacatcagcaacagtcagctgctcacaaatgataataaagatctgggagggtgaaggggccaaggagaatctgtccttccagcggctctctgggaacttgccagagaaggctggagcaggggagggccttcaccagacgtggcctggttctcacctagatgctgggcagagaccaaggagcacgtgcgagggccttccacttggaaagcaccatgccagcatcaggagtggtcctcctgttcaggtatggtggtcacaaagaaaatggaagacagcaccatggcacgtgtatacctatgtaacaaacctgcacatgtatcccaggacttaaagtattaaaaaaaaaaaaaatggaagaggggctgggaagctttgggctgtcagagaaagtcaatttccaggcattagccactcaaacggacttacacttcagacttaggaggcagcttcagactcgctaaaatactatccatgtcagaattcaaatccttcctcttcacaccctcctgatagatgtaaaagcccttcccagatttacgacctaaaacaggcaagaaaagggagtgttactatttgttctcagggagggagtgttactatttgttctcagaaccctggcctggccaggcgtggtggctcacgcctgtaatcccagcactttgggaggccgaggcggaggatcatttgaggtcaggagtttgagaccagcctggccaacatggtgaaaccccatctctactaaaaatacaaaaattagctgggcgaagcaggaggatcgcttgaacccgggaggtggagacgagattatgccactgcactccagcctgggcaacagtgtgagactctgtctcaaaaaaaaacaaaaaacaaacaaaaaagaccctgacctgagaattcttgtctctgttggtctattataaagctctggcctcttctgaattcctgaatttgtatgtctagctaaccctagcaaattagtctttgtcagaagagtgggcagagaaggaaagaagatcttgtgacccggagcttgggcatctgtgtacatggatgagaaaggccacctgggtgagttttaacatccccatatgcagcaccgggtcctagaacacccaggttgtaatgctgattttgctgttttgccaagacagaaagtcacttctctgtgggcctcaactgtatactgtgtatggtgagcttatacattctcctcacaggtggccagacagcatggtaaagcccggatgcagagcttgcttctgcactattgcagatttcatctcggggggataaaaatgcttgtccatctggcataacttggaccaggtgatgctagagccccagaagggtagaactctgccttttgtccataatctatagtcctagcccttagaaggttcacatgacatcttttttttttttttttttttgagaaggggcctcgccatgttgcccaggctggcctcacacttctgggctcaagcgatcctcccacctcagcctcctaagcagctaagaccataagtggttgctaccgcacctgactcataaaatcatttttgaaatcgccagtgataagggctctgtgtttagaaaactttcttccacgagggcttctgtaactctttggtctcaggaactgcttagaactttgtaactaatggtgctagttatgtttccttgaggctactcacctaggaagcccttggacaccatctgtgtcagcagttctgggtttccacctccaaaccgctccccaaagactttgcccagatcttccgccacatgtttcgctacatccacaccaacttcatccaccagtgtggcggcacccacaggaaagccaaagcttgtggtcagggaatccagcttcttcgggtcaactccttcctgaacaggaagcgatgcagggacctcaggggaagggcagcccaaatccccccaaagggctccctgtactggctccaaacactgccttgtgtaaaacccacttctgagtgtcacctgaccaggcccaggactggtgctatttcattcagggaagcacaaagaagtttggggccacaagtggaaagtctgagccttctctaatctacagcactttaaggacgtttagagatgactaaattcttcattttcttcttgtttgcatttctgaatctcaataataaggagattgcatgacagacggctgagtgtgtcatgaccaacagaagaaacatcatcaaagaggagcactcagagccctgtgatccccaagtctgggtaagtgcccagcgaggaggatccctctcctttcctgccagaatgacctcgatggctactggagaggtctgtgtgctgtggaaacagatgcagcaccagttgaaccaagcgggccctgttctggatggtccctgcctcagagaggtgcagaaacagcatagaagacatgctggggggtggggtgcctttagcttgctggaacagtgaggaggctgtggggcagagggaaagctctgcccctttcagtgcagtataagcccaacttccgactgctgtgcagagagagggcaccagggaccttcctagacaagagcaggagttggtgtatcagaaggaagcttggtccttatcttgacatcatgagttttagagtgactgaaggagtggaagatgccgcaaacactctggagagcaataccaacctggaggattcggatgacttcagacatcatgggcgcaagacacctggtagtatagaagccaggtccatcctgccaaggaagagaacatgagctcactggccctgctgctgggactgagtctgaaacactctacctttcccagggtcacttcaaagtcatttgaaagtcactgtaaaacttaaggtgacttaaaatctcaatcagaatccttaaaaatgaaattgcaggggaagccgtactaggggtagcctggcttgaatcaaacagtacagcagatagtttcatggtcaccttcaaggtctgggatggctgggagaaccctgccacatcctagatactccccactcccaccttgactcagtgggacagtcaataccaccgtccatcctggagacaacccaggggaaaatcatatcaaagtctggtcatttgccccagaatatttataaacaagcctggaggtaaaaggagtcttattagaacttttcaaaaactctgcagctctgttatacagccccttaccttaaccacaatgatgaccttcccctgcttgagaccaactgctacagctgaagcactggtgtctttggaagttttctcggtcgtgataatctccagcagctgcatcttgtccacgggagagaagtagtgcatgccaatcacctggcaaggggaaccaaaagccaacagatcggagaatgcgggtgaggaacctgagagcattccttctctgctaggaaaacactagaaagaaaggtggctgtgatataggaatactgcttgacatagctgagtggtttggttccatgggtctttgataaaagtttagtatgtttagggagagcacattggaatcctcctcttccatttgcttctaaggtttttcactacagacatctgatcctcccaacaatcagtgccaaaaccacagctcgaggccaaactagatttattggggaacgacggatgaaggttccacttatattaatgatactgatggtttagataagaggatccagtttttttgggcgggggtggggcaggcagaagaattaatgtgttgggctgtcagagaagtatttgcattttacacagatgggtctcaccaccaggatactaggtttaactaacactcctcaacagtcagatgcacttaagactcattaaaccagcagttctccaagtgtagtacccggacccaacaagcactgtcatcacctgggagcgttaggcctgcacattctcaggcctagcccagccctactgaatcagaaactccatgggtggggcccagatttgttttaataatccctcctggtgattctgatgcgtgctaaggtttcagagaamcccctcattgagctaacagttacatagtcttcccaacagaactgtggtgaaagaagtctaattcattaatttatagttttgctttctccctctcactttagctataaggtacaacaagtgatatctgtaatttttggctgctcattatctacctgctcttcaatacatttaccacttattccttacatttaatccattacaaccctatgaactggtcagcctaattatctagatgaggaaaaaaggtatcaagaggttagtagtacagagtcagtcagcatatgacggggtgggattccatcacaggtctgtctatctccaatgccattatgtaatacacagatcaagtaaatgttatgtaaacttatcaatccaaaagttgtttctaacccctaaagtgttcttttacttacatctgaaatacttaggacctgattcagactcagtactcctgagcaaaaggaattagcctttattgatgtagaatttctatataataaaatgcacagatcttgaagtgttcacatcaatgagttttgacaactgtatatacatccatataatcactaacccaagcaaaatatatttacatcactcagaaagttgtgccaaagatgaccaactcatcctggatggctggggatttcccaatttgtggcactgagggtcctgtatcccttgctcccgggcaaaycaagatggttggtcaccctattttgtctttttggccttacttttaaatgaatgacaaaaggcaagcaggtgagaaaagctgtcctagatacttggagggcagaactgcaaagtgtgatgcttgctctgctccgatggcggggagaggttaccatcaaatgaacagcaacggcatcgcctgtactgattttagatgccacacagatgtcttgagtgatatgacatggccagactgtccatctgtagactatcggctgcaacttctccctatgacctttagcctgccatcattgagcctgcctctgtcaggtccccgcatcacttctaatctgctgtgtgctaggaaactagattaccttgcattagcaagctagaagagtaggaataaataggcttttgtgttttcagtacatagaatttgtattaacactttcagctgcttaaagttcttttataattcctgcctaccttcggctggttctggttagcagaggctaactggtatcctccagagaagtgagttgttttacttctctttgaatgatttcacttccccttaattactctggttgagagcaaaaataaatttctgggcatcattccaaatactcacagaaagtgcttctatacccagccctttcatgtcccggggtagaaggtgtaagcaaacccacgggcagacacatcccaccattcctgccattccctgatctggaggtggaaccaaacctgttctaaacagtcactgactctgctctgtagccaaactggtattttggagcatcctttcttaaggcctatccttcaatgcctaattctaggatacaggtgggctttatatcctgaacctgaaaaataatgcccatttgggatccttgaaaaggatattttttgttgtacttaacttactcctgcatctcacactagtcatggtattagcatttattgtgtccagtgtttaggaaccacccgcatccactccgtaatccactgtctcttctgtactcaagctgtaagcctttatcagtgaatctgaagcaataaaacatctcagggtttttctctgttccgagtttaccttctcaggtcttttgctgacagcagcgatttcactgattgggagagcagatgtgttactggcaaagatacagtgatctggaatcacctgcaggggaaaagcatttaacaatgtgtcaggtaggcctgggagatgattagaggccacatcaaagctaatgagtgacacctgggcccagcccactctgtcccccacaactgctcagacagtagatgtcactcacccagacattgacggatcacctagggggttttgtgtcggggaatatgttgaccttgttccttttcccattctgccttcctctagttatggcccatcataaggtcaccttatcctgacctggagactacatctcagcagttgggtcaataaaacagcttagaacaacactgaaaagacggccttgaattgcaattcattgatttcaacacccagcatgggtgtcacctcctcttttgtttggatctgccctgaatcactccccgcttcacctttataagaacaagccaaaatgtgcatgcttgtctcattttatacagtgtgttactaaaaaacggcataccactatagttgcagctacagtacacaaatactattaactattagctttatccacctggagaatagtctctaatgcagattgtctccgcattctggccacgatcccaacttattcatgttttttttttgttttttttttttaaagacagagtctcgctctgttgcccaggctggagtgtagtggtgcaatctaggctcgctgcaacctccgcctcccagttattcatgtttttattcagatggttggatgagaaacgtggaagggacacctgtcaaatgtgtgcaaatctggaacaggcagaatcctaacagagatgagaatcaaggaggaagacacattcaacacactgaaaagctgagtacaaaataagattataatgcaataaaagtaaagtactgccttaagatttaaaaaaaaaaggaaagaaaagaactgtataggtacttgaaggacaagacctggcttggcagtatttgtgataaagatcccatgattttagttaatcaagagtggagggtgggcatggtggctaaacaactataatcccaacacttcaggaggccaaggatggaggattacttgaggccaggagttcaagaccaacctcggcatcatagtgagaccctatatctacaaaacataactttttttttttttttggagacaaagtcttgctttttcgcccaggctagagtgcagtggtgcaatctcagctcaccgcaagctttgccgcctgggttcaagcaattctcctgcctcagcctcccgagtagctgggattacaggcacctgccaccatgcctggctaatttttttgtagtttttagtaaagacagggtttcatcatcttggccaggctggtcttgaactcctgacctcgtgatccacccgcctcagcatcccaaagtgctgggattacaggtgtgagccacagtgcccggccctacaaaaaataactttaaaaaactagccaggcatggtggtacatacccatagtcctagttactcaggaggctgaagtgagaggctcgcttgagcccaggagttcaaggttacagtgagctgtgatcatgccactgcactccagcctgggtgacagagtgagaccctgtctctaacaacaaaaaaacaaaacaaaagtggaatgaattgacagtacagcatgactgtcagaaagcttacgtagtgtcaggttactttcttagtaatatagtgtctaatgctggtggtgaaatcctttctgaagagcaaactaatgtctccaaagctggctggcaaacattcttcccttccttggacatgtatgtcttttctcccagctagaagtagagtctgtttcccttctccttgaatctgggctggtcttgtgacttgtttttatcaacacaatgcagcagaagttaccctgccagttccaggcctacctagacctgtggggcccggtagcctctttttttattttttaaattatttatctttttttcttcctgacaataaacttaggaagctcagtagcttctgcttttgttctcttggaagcctgcagccacgctacaaagaagttgtggtgagacgactaagtgaggatggactatgagagatgtgggggaagcagtgaggtgccccaaccgagcttcctgcggaatgcagcccaggagtgaccccagccttgaaatcaatggacttaagcaccactgtctctgcagagccctgcccagattgcagaattgtgaaaagatagttgtaaacacagcagtagaacacggagacatgaggaagatactagagaggacaaccgaaacggggtggtctagagatcatgcctgtggaagattgtccaaggaatgggttttgttagctctatgggcaataagagaagataatgtttgtttgtttgtttatttatttattttgagacggagttttgctctgtggtactcttattttttgtaatgagctcactgctcattatatccagcatgttgccaagtcagaatcatttcatgttcacctttcagtaacccacattctgtttatccaactgtagactagcttaggccttggtcctacctcatccctgaattactgctattactccttctcggggcttactcttcctactccccacttcaagtacttgttttgttcatgtcagcccatctcaagaagtgcctatggagaacatttgggagctgggccaaagcagcatttccacagaacaagcatctggacgaactgtcttccctatttcctttgcagccttagacctgaagaggtttgtttttggctttcagctaaccaaaaaatctcaaagcatctggctatactctgtgaggttatctgtatgtttgggtgacagagctcctacatgaataaggtgaacgcaccctcattttcttcctttagaatttagatttgacctttataacatatgcagtgtgcatgagcacacataaaaacttaacgtttgataacaaaaagtctttttttttttttggagatggagtctcgctctgtcacccagactggagtgcagtggcatgatctcggctcactgcaacctctgcctcccaggttccagtgattctcctgcttcagcctcccaaatagctgggactacaggtgtgtgccaccatgcccggctaatttttgtattttctagtagagatggggtttcatcatatcggccagtctggtctcgaactccttacctcgtgatccgcccacctcagcctcccaaactactgggattataggcgtgagccaccatgcccagcctttgaatagtcctttttataaaagcaatcatgagtttcctatagctcctttaaaaaaaaaatctctgtgttttctgttcactacactaggattcaagtacaacagccccttgcttaccgcttctacttcctttagcactctgtgcttaagactaaggtcctcaaacacagcttcaatcaccatgtcggccttttcaaaaccttggtaatcaagctgcccagtcaagttgctgaagatggaatccctttcaaatgatgttagagctttcttcttcactttgtcattcaatctagaaaaaacacattcctagttagatgggaagaaaaggaaactaacgtttattgaatgtccatgggccagagcacacctgtgtttttcaccaactctgtgaggtagttattctattactcccattttgagggagactttcaagttgtttagtcttagagggacctgtggtcaaatagcttgataagggagggtgctagcattcaaagacatgttaactcccaagtacacattctttctaccatagaatgcctccaaatgcccaatttacgtaaactaaatcactcttaaaccagttaaatttgccaagaggagtaaataacatgaacactagaatggcaaaacaaaagaggagttctggtaattctctacctatgacaggggaagcagccaacgtgtgtctgagaccacatggtttatatttgcttatcgcaaatatataattttatgttattctgtagttgtaatctttttttttttttatttattttttgagacggagtctcgctctgttgcccaggctggagtgcagtggcgcgatctcagctcactgcaacctcttgtctcctgggttcaagcaattctctgcctcagcctcctgagtagctgggattacaggcgcccaccaccacgcctggctaattttttttttttttttttagtagagatggggtttcaccatcttggccaggctggtcttgaactcctgacctcgtgttccatccgcctcagcctcccaaagtgttgggattataggcgtgagccaccgcgcccagcctgtggttgtaatcttctaaagaacagagaccaagcattatttcctatattctccatctacttcccactcattacctagtagcacattgcactgattacataaaatattaactcaaggtttcttttttcccatagggagcagaaaaggattcctgttattcagacattcaactgattatttttcgtcgccaagggaaacaggttctcttagattccgtctgaccacactttcagaataaattacctacagttttcctctaaatgaagaatgaagctaaaccccattcactaatttccttaaccaaaagcaaaattaaggccacaagataaatacaaaggagtattcaaagaaggtcttaagggctgggcatggtggctcacatctgtaatcccagcactttgggaggctgcagcaggcggatcacttgaggccaggagttcaagacaagcctaaccaacatggtgaaatcccgtctctataagaaaaacaaaaatcagctgtgcatggtggcgcatgcctgtagtctcagctattcgtgaggctgaggcatgagaatcgcttgaacccgggaggcagaggttgcagtgagccaagattgcaccattgtgctctagcctcggtaatagagtgagactgtctcaaaagaaacaaaaacatcaaataaggtcttaaaagtatgggctcaaagcttttgtttttgacaatcatgacagcagtcagcaaacaagatacttgtcagcattcaaaacattatcagttgctctaattctaatgcctgattaaactattcccaagagaggacaggaactattgtcccaagtcagcagtgtggtgagcggcactcgccagaacctgatgtttctaagacgaaaaggggaacccaggacactattcaagagagactgggggaggaaactattttagagcaacaatttcttactttggtgatggtatggaatgctgtttgggatgcttgcatgctagtttcagggcactgctgctatctagcacacatcatttttttggtcagaatcttctactacaacttgttatcttacaat

SEQ ID NO: 97072 - DNA, 13189 bp, Homo sapiens
aaataaaataaaaacaagaaagcccccttccctgagggaattggagggaaatcaatgtgtcccttctctctgccctgtaacaacaaacccagctacacctggcacttccatccaggccctttcccatatatgaagaagagttgaggccacaaatcacatgcccatcaatcccacaccctgaaaaattaatgattaatgtccttaggatgcagttaacagaaaacttcaatcaagaaatcactgggcatactaatgagtccgctatgtctccttagggttgacacctatgagggtggcagcacctgaagctccattcagcctcaggcttcattctgacctgttccctctcataccttcccccagtattccagcagctgttatccttcccaacccccggctttttttttttcttttgtagagacgtagtcttgctctgtcgcccaggctggagtgcagcggcacgatctcggctccctgcaaccttggcctcccgggttcaagcaattctcctgcctcagtctcacaagtagctaggactacaggcgcacaccaccatgcccagctaatttcttttgtattttcgtagagacggggtttcacaatgttgcccaggctggtcttgaactcctgagctcaggcgatccgcccgcctcggctcccaaagtgctaggaatacaggcatgagccaccgcgcccagcccaacccccggcttttttaagatagggtcttgttgtgtcacccaggttggagtgcagtggtgcgatcacagcttactgcagcctccacctcctcggcttgatcctcccacgtcaacctcccaagtagctgggactacaggtgtgcaacaccatgcttggctaattttttaacttttctgtagagacggggtttcgccatgctgcccaggctggtcttggattcctgggatcaagtgatttgccctgctgggcctcccaaagtgtgggaattacaggcatgagccaccacactcggctgaacatttgatatttttaaaaacctggccgggcgcggtagctcacgtctgtaatcccagcactttgggaggctgaggcaggtgggtcacctgaggtcagaagttcaagaccagcctggtcaacatggtgaaaccccgtttctactaaatatacaaaaaattagccaggcatggtggcgggcacctgtaatcccagctactcgggaggctgaggcaggagaattgcttgaactctgcagtcggatgttgcagtgagccaggaccgcatcattgtgctccagcctgggcaacaagagcgaaacttcacctcaaaaaaaaaaaaaaaaaaaaaaaaaaaaaccatgccactaaacacactctcccttttccaatgccttatggtgaaatttcaaagcatggttttcttcaccacataacattttggtcaatgatggaccaaatatacaatagtcccataagattataccttcctccttgaattgtctaattagaaaaattttttaaagatcataatactgtatttttcccatacgttttctgtttagatatatttagatacacaaatactatcgggtcacaactgcctacaataatcggtacagtgacatgctgtacaggtgtatagcctgggaacaataggctataccacagagcctacatgtggactaggctccaccatctagacgtgtgtaagcacactctatcatcttcacgcaaccacaaaatcatctcacaacgcattcctcagaatgcatccctgctgttaaacaatgtgcagccattaaggacaaaatggaggagctgactcctttgctaccactttgaaacatacagaacttatgactagaggaaaaagtatattatctgtgtcatcccaccaggctgttgcaggaatcctaataaatgatgagcactaacaactgtttagcactatgtgccaggcaccattctaagcacttcgcatttgtcactggttgttcagctcttgcagcaatcctacaagctgggtactagtactgtccccctttgcaagtcaagagtggggtgtgagctactaagaacaggacccttgtctgcctgttccccatggaatccccagctccccagcagtgcctggcacatggcaggcgctcaatgcatgcttgttcgccacataaatggggaagagtggctgggtcatttcttgcacaactccagggggcactattcacattgtgttctgtctacaggcaccatgaatgggtccttctgtgccatggcagccttgatgaccgagggatggaaagacaaaaccaggagtcaaacccaggtggttgacttgacaacccttgtggaaagaaaataaccctaggcctcagtttccttactgatagaaagttccaccagactggctgggcacggtggctcacgcctataatcccaacactttgggaggccgaggtgggcagattacaggaggccaggagttcgagaccaggagttctggccaacatggtgaaacccggtctctactaaaatacaaaaattagctgggcatggtggtgcacgtccttagtcccatccactccagaggctgaggcatgagaatcgcttgagaccaggaggcggaggttgcagtgagtcaagatcgcaccactgcactccagcctgggcgacagaatgactctgtctcataagaaaaaaaaaaaaagaggccgggcgcggtggctcatacttgtaatcccagtactttgggaggccaagggccaaggtgggtggatcagttgaggtcaggagttcaagaccagcttggccaacatgatgaaatcccatctctactaaaaatacaaaacttagccaggtgtggtggtgcacacctgtgatcccagctactcaggaggctgagtcagaagaatcgcttgaacccgggaggcagaggttgcagtgagacgagatcgtgccattgcactccagcctgggcaacaagagtaagattccgtctcaaaaaaaaaagaaagaaagaaagaaagttccaccagacatctgcccaaaaccctagtccctcccatgctcccacctcccacaaacagccaaaacatggaatggtctaaggttatctcctggtgttttgagggttcccaaggagaagcaaaggtacacaaataaattgtaaataaatacacatatgttggaatgctcctcactgacaagaagtttagagaccactgcactgccctatatcacaattctgatgacatcacctcccctgctcaaaagcctgcacgatcaacatttacgtctcctaaagggctggacacaaaatgattttaggtggcccatgcaaaaccatttattactttcctaactatgcatgaattaatttttattcctttttttagacagggtctcgcttcgtcacccaggctggagtgcagtggctcaatcatggtccactgcagcctgtacctcctgccccagcctctcaaggagcttgggactacaggggcattgcactccagcccggatgacagagcgagactccgtctcaaaaaaaaaaaaaaaatcaagtgttcactacgcatcaggtgcagcagtgtgttagcggcttcccatgtgacctcattcaaccctcacaagaagcctgtgaagtttcgggcatcctcgtcctacctgtttcacaagtggggggccctactgctaagcgcctcgcttgaggttaagctacgatttagagagctgggtgtgaattcaggaggtctgattccagaatgagtactccttaccaccaccccacgctaaccaccaccccacactttgtaggggagatgaggacaactgaggttcaggaaacaatggcttggaaagtgcaaaaactgttcaaacaactaacctgtatcccttacaatccacccccagtcctgcaccaagctttctttttctttttttttttttttttttttgagacagtcttactctggtgcacaggctggaatgcaggggcacaagaatggctcactgcagcctccacctctctggctcaagcagtcctcctacctcagcctcctgagtagttgggaccaccggtgcatgccaccacactcggctaatttttgtattttttgtagagatgaggtctcactatgttgcccaggttagtctcaaactcccgggttcaagcaattttcccgcctcagcctccccaagtgctgggatttcaggtatgagccactgcacctggccctgcaccaagccttttacacagatggtcacgcgatcttccacaggaccccctcattcaatccacataagttcgctaaagacctactatgtgtcaggcccagggtactgtggggccagccaggcagacacaaccccagctctcacggtgctgggggtgacagctacaccggaaaggaccaagttgatgtatgaatgtagctgaggggaacaatggctagtccgaggtggccagggaaagtcaaaatacaatcctggcgcagtggctcacacatgtagtcctagcactttgggaggccgaggtgggtggatcaccttaagtcaggagtttgagaccagcctggccaacatggtaaaaccccatatctactaaaaatacaaaaattagccaggcgtggtggcgggcgcctgtagtcccagctactcaggaggctgaggcaggagaatcgcttgaacccaggaggcggaggttacagtgagcggagattgggactctgaactccagcctgggcgacaggcaagactctgcctcaaaaacaaaatacaatcctacacaccctccctgattttgaggccccctcttccaagcagcccccgtgatctctggctaccaccgatcccctgcctgtccgctgtgtccctctcacagtgcaggttcagagcaataaacgataggccaagagagtttgttcccacatttaccacccgctcccctccaagactgcagaggctccaggatccaacccccgaccatccaacacttagtagggcctcaagaagttatctgctgaacaatgagggagattggaccagacaattacaatagtgcttcccgcttgcgaggaaccattttacaggctttcaccaattccatttgggagattaccccctttcacaaaggagctttcacaaaggaggaaaactaagaggttcagagaggttaagccacttccctaaagtgacagtgtgctaagtgactgacagcaccaggaatcaagcttgaatgcagcctatcaatccaaactgaaaacttgcttcaaattcctgcgaagcggcttttccgcttattcccttgctactttccccaaggagtcactgaccaaaaaaaaaaaaaaaaaaaatcaagactggtatcttcaagatcgggacaaaacactcgcccaaaaggtccacgttgaaaataaaagccttaatctgaaaaaccaattgggaaggagaaaaaaggatgcaaaagaaaagcaatgcttttacacagcaaaggatttcctccgtgctcccctacttgccgccgaccccatccccaaccccaattcgggcaaacattttgaagtcactaactgcaaggcatcgggggagtcctttacctttccttgaaaatctggaatgacacgtttttaagacaatttgaggtcggctagcccaaggggaccgctaatgcccgtgtccggccgacgccggacatatctggaggtttggctgagccccgatcgcagcttcgccaaaaacgcaacattcgggtcggacccgttaccacgcagccagaaaagccccaacgcctgcctattgttgcagccgctgtaattgggagggcgactgtaggggtgccgggcgaggggggcgagctttgtccggcgaccccggcgagagcgcgcgcggagaggatcgcgcggcctccacgcggcccgggccccccacccaccccgccgctccgcgggggccgccgctgccacggcctcgcgacactgtggccttccccacgcgcgcggctgccggctgggcttcttgaccctcgggcgccgccgtaccccggccccgcacagggcgcgccggcagccccctcccccctcggcgccccggctccattcaaaccgccctccccggccccgcgccgcgctgcccccgcggcccgcgttccttaccaggagccgccggcgccgtcgacttcccggcgcctcccccgcccctccgcgcggggccgggggcagaatgggcgtctcgcttctcttcacgaaacaaagaagccgccgccgccgccaaacgaggggaagcctcgcgcgcgcgcccgcccgcctcggccaccgcccccccttcacacacacgcgcgccacccgcgcccccgctgcgcgcgcgctcgccggctcccctccccctcagcaccgcggcggcctctccagcttccgccgcctgcccggcctcgtgcgcgcgccagcccgcccttccgctcccggcgcgcgtgcgcgcccgtccctgggcggacgggggtgggcgtggcccggaggaagcacgcgcgtccgatgcaccgccccactcgggccgcgatggccccgcgcctgcgcacgcttcgccttctgcacgcctcgcgtcttgacgccccrgagcatgcgcagagcggacgccactgcggcggcggtggcggcggccgcggtgacgatggggcaactggagaatgggatcccggtggccgtggggtccgtggggaaaggaggtccctgaggctcggaaataggaaccctggaccgtaggacgggccgcctggaccaagaccgggcagtggtttcccgcgggccaagggcgcgcctgggaaccgctttgatccctgacctggggcggcgaggcctattwggggaggcaaggcggggcccgaccgtggccgccttctctgcaaaacttcccaagtgccattaattagcttagcaaatatttattgatctgctactgtgtcccagccgccgtggagccctcggtctagtggggaaggaggacaagaagcaagattaataagcaaaatagtgcagtatgagaggccggacttggtggctcacgcctgtaatccagcactttgggaggccgaggcggccggatcacctgaggtcgggagttagaaacgagcctgaccaccatggtgaaacccgtctctattaaaaatacaaaaattagccgggcgcggtagctcatgcctgtaatcccagcacttagggaggcctaggctggtggatcatgaggtcaggagatgagactatcctggctaacacggtgaaaccccgtctttactaaaaatacaaaaaattagccgggcgtggtggcacacgcctgtagtcacagctactcgggaggctgaggcaggagaatcgcttgagcccaggaggtggagattgtagtgagccgagatcgtactattgcactccagcctgggcaacaagagtgaaattccgtctcaaaaaaaataaatagtacagtgtgaggtgaacactgggaggatcatggacattttaaatagggcagccacggaagtcgtcgttgcaaagaacacgtttgaatgcatacaggctggtggtgaaagagagaaaccttcctccgagagtgaaggccctgagcctcttggcctcttctgtgtgttttcttttttgtgtgtttgtttgtttgtttgtttgtttgtttgtttgttttgagacggagtcttactccattgcccaggctggagtgaggtggcacgatctcagctcactgcaacttctgcctcccagattcaagcgattctcctgcctcagcctcccgagtaactgggactacaggcgtccgccaccacgcccggctaatttttgtatttttagttgagacagagtttcaccatgttggccaggctggtttttaactcctgacctcaagtgatccgcccacctcagcctcccaaagtgttgggattacaggcgtgagccacctcacctgggtgggtttttgtttaattgtttgttttattagagacagggtcttgctctgtaacccaggctggagtgcaatggtgtaaccacagctcagtgcagcctcaaactcctggactcaagggatccacctcagcctcccaaatagctgtgactacaggtacatgccaccaccaccagctttttttttttttttttttttttgtctgttatgttctgtagagctgaggtctgctgtgttacccaagctggtctcaaactactgggctcaagcagtcctcctggctcagcctcccagtgcactgggattacaggcatgagccaccaagccaggccccagaaggacctgggtttaaaacacgactccatttctactacctgggtgatgcatgggtaataccaggcaggtttaccagagcatctacacctcactttcttcacctgtgaaacaaacaataaggctgggtgcggtggctgacatctgtaatcccagcactttcggaagccaaggtgggcagatgacctgaggtaaggagttcgagaccagcctggccaacatggtgaaaccccgtttctactaaaaatacaaaaaaattaattagccaggcatagtggcaggtgcctgtaatcacagctactcggcaggctgaggcaggagaatttcttgaacccaggaggtggaggttacagtgagccaagatcatgtcattgcgctccagcctgggtgacgagagtaaaactccatctcaaaaaaaaaaaaaaaaaaaaaaaatgctgggcccagtggctcacgtctgtaatcccaacactttgggaggccaaggcaggtggatcatgaggtcaagagattgagaccatcctggccaatgtggtgaaacaccatctctactaaaaatacaaaaattagctggctgtggtggcgcgtgcctgtagtgccagctactcaggaggctgaggcagaattgcatgaacccaggaggcggaggttgcagtgagtcgagcgtgccactatactccagcctggtgacagagggagattccgtctcaaaaacaaaacaagacaaaacaaaaaaaacccaccagaaacaataatggctcccacttccactgtttggttatgaggaatcatgacagcaggtagcccacctgctagctctctgatcctcagctagtgttattgaatagtgcacagtaagtgagcaagtagaagtgggatctgaactcgattcctcattcattcaagtagttatttttttgtttttttgtttttgtttttgagacacaggcttgctgggtcatccagcctggactgcggtggcacgatcagtactcactgtagcctcgacctcctgggctcaagcgatcctcctgcctcagcctcccgagtagcttggactacaagggtgggacaccacactcagctaattttcttaaaattttttgtagagacagtcacactatgtcgtccaggctggtttcaaactcctgggctcaggtgatcctcccacctcagcctcccaaagtgctgggattacaggcgtgagccaaggcgcccggccaaatagtatttcttatgctctctccaaatgctaagcattgagctaggaataccctgcagcaatgcatggaggaggcagggttgctgcccatggagtggatggtatgactgttctctaattgtcttttatgctaatcacactaatatgcaatagtgtaaagaaaaacaggccgggccaggcgcggtgcctcacgcctgtaatcccagcacttgggaggccgaggcaggcggatcacctgaggtcaggagttcaggactagcctgaccgacgtggagaaaccctgtctctactaaaaaaatacaaaattagccgggtgtggtggtgcatgcctgtaatcccagctacttgggaggctgaggcaagagaatcgcttgaacccagcgggcagaggttgcggtgagctgagatcatgccgttgcactccagcctgggcaacaagagcgaaactccgtctcaaaaaagaaaaacaggccggttgtggtagctcatgcatgcctataatggcagtactttgggaggcccaggctggcagatcacttgaggacaggcgttcaagaccagcttgggtaacattgtgaaaccccatctctacaaagcaatacaaaatttgccaggtgtctcaattaagagcacagttcttaataatgaactgcccctgggaccttggccccatgtctgcattgacacccttggcttccagactttaaaaaaaaaacatctacaggctgggcgcagtggctcacgcctgtaattccagcactttaggaggccgaggcaggcaaatcacaaggtcaggagctcgagaccaggtcaatatggtgaaaccctgtctcaaccaggcacggtggctcacgcctgtaatcccagcactttctctgggatcgcaaggtcaatatggagttcgagacctggtcaatatggtgaaaccccgtctcagctgggcgcagtggctcacacctgtaatcccagcactttgggaggccgaggcgggcagatcacgaggtcaggagatcgagaccatcctggctaacacagtgaaaccccgtctctactaaaaatacaaaaaaattagccaggcgtagtggcaggcgcctgtagtcccagctactcaggaggctgaggcaggagaatggcgtgaacccgggaggcacagcttgcagtgagctgagatcccgccactgcactccagcctgggcgacagagcgagagtctgtctctaaaaaaaaaaaaaaaagagagaccccgtctctattaaaatacaaaaattagccaggtgtggtgtcaagcacctgtagtcccagctactcgggaggctgaggtaggagaatcgcttgaacccaggaggcgaaggttgcagtgagccaagatcacaccactgcactctagcctgggcgacagagactccatctcaaaaaaaaaaaaaaaagaaggggaggagagggcagggcaggggaggggaggggagaggagggaacgggaagtgggggaggggaatcatcccagaggagaatggatttttttttttttttttttggcgcaatttccgctaactgcaagctccgcctcccaggttcacgccattctcctgcctcagcctcctgagtagctgggactacaggtgcccgccaccacgccaggctaattttttgtatttttagtagagacggggtttcaccgtgttagccaggatggtctcgatctcctgacctcgttatctgcccaccttggcctcccaaagtgctgggattacagacatgagccactgcgcccggccttcttcttttttttttttttttttgttttttgagacggagtcttgccctgtcacccaggctggagtgcagtggctcaatcttggctcactgcaacctccacctcccacctcccaggttcaagagattctcctacctcagcctcctgagtggctgggattacaggtggattcttctcttttactcaaagatgagggcttgaaataacaactcacccaagtccagaacatgaaaatgtaaaatacattgacttcagttgccactgcaagttaaacaccttttcagtaatatctccagatcttccttggaatatgaaatcactcattagttaacaaaatgtgcatttattcatcaaaaatgacctcttgtgcctgggcacagtggctcacacctgtaatcctggtattttgggagtctgagacgggcagattgcttgagcccaggagttcaagaccagcctgggcaacatggcgagaccccatctctactaaaaatacaaaaattagcatggcatggtggtgagcacctgtaatcagagctactccggaggctgaggcaggagaatcacctgagcccagaaggctctctagcctggtgatagaggagaccctgtctcaaagagaaaaaaaagaaagaggtcaggcgcggtggctcacacttgtaatctcagcactttgggaggccaaggcgggcagatcacacggtcaggagttcaaggccagcttgaccaacatggtgaaatcctgtctctacaaaaaatacaaaaattggccggcgtggtggcgcatgcctgtaatcccagcttctcagaacgctgaagcaggagaatcgcttaaaccccagaggcagaggttgcagtgagctgagatcgcaccattgcgctccagctagggcgacagagcaagactgtatctccaaaaaaaaaaggaattggcagggctcaggcctgtaatcccagcactttgggaggccgaggcgggcagatcacgaggtcaagagatcgagaccatcctggccaccatggtgaaaccctgtctctactaaaagtagaaaaattagctgggcgtggtggcgggcatctgtaatcccagctactcgggaggctgaggcaggagaatcgcttgaacccaggaggcagaagtgaggttgcagtgagccaagatcgccccactgcactccagccttgtgacagagggagactctgtctcaaaaaaaaaaaaaaaggtgatttccgtaaacctagcagtgagatgtacgatgcagaaaacagttcttccaagacagaaactcagggcaatagctttattttatccagtagctgtggttttaacacaattcaggaaatccccagcatttcacatcatgtttatactaagcatcccacttctaccaactacatatggaaacctgactgcccacatttgttagaaattttgtaggtgttttattttagctatattgttttatcttaagttgaatttattaagctcttctaagattctggctctgaatgatggcactttgggtctccaccaagagtaatcaccaaactgggtgcggtggctcatgcctgtattcccagcatttttggaggccaaggtaggaggatcgcctgagcccaagagttttagaccagcctggccaacatagggagacagtatctctagaaaacttttaaaaataagcgaggcgtggcagcacatgcctatagtcccagctactcggaaggctgaggagagagaatcacttgaggccaggagatcaaggctgtgtgagtcatgatttcatcactgcactccagccagggccacagagcaagacccagtctcaaaaaaataaataaaaaggaataaactattgagatgcacaacagatgagatgaatgaatctctctttttttttttttttatttgagacggagtcttgct

SEQ ID NO: 97073 - DNA, 25787 bp, Homo sapiens
aggtgacattacagcaatcacctctacgtgaattagatttgctgtttggggggaaatgaatggctttgaaattacctgtcacagtcaataaagaaattaaagaaatgctaggagggctttcaaaatagccacggcctggtgcttttactttctggaaggtgactgctcctggaaaatgctctcaaaattccatatgttatcttggacagtcaggactagtaaaagtttcttcgtttttaaattatataaagtaagataccttcccactgtcaaaaggtatctaccttctgagaatgtccttgtatgctgcatacttcccacatttatgtatcaatatcttgtatttttatcctaactacttaaaataccagaaacgtctatttgcaacctggagtttaggctcagctaatcgggcatattgaagcatattcatgctatattttggcacaaatgtcaagatatctaattttattattaaaatactgtcagagaaaatgctttagtaacttttttagtaaagacaagaccttggtggaaaaccctcccaggaatcccatttggtaaaaacgcagtgtaaatatataaggaggattccatagctacccagaatattgaactcttatgagtaatgcacataataaatgtaataaaaataattaaaagaatacataaaacagaccggttttataaaactttgttgatcatataatttttttgagatgaagtttcactcttgtcgcccaggctggagtgcaatggtatgatctgagcttattgcaacctctgcctcctgggttcaagtgattctcctgcctcagccttccaagaagctgggattacaggcgtgtaccaccacacagctaatttcatatttttagtagagatggggtttcaccatgattggccaggttggtgtcaaactcctggcttcaggtgatccacccgcctcagcctcccaaagtgctgggattacaggtgtgagccactgcgcctggccagttgatcacataattctgatcttccttaaaattggtttccattaatttagatctctaaatatatatatagtcatcactttgcaaaaatgcaatagaattttggctatcattatatgccacttactttaacacacttttcatttagtccttttaaccccataaagtagatactattatctcaatgatgacaaatgtagaaattgaaagtcagtgaagaaactctttaagatgccacacatatctttttttttttttttttttttttgtgctgttgcatccctaggacctggcatcatatcaggcactatgtgtcaaataaatgtaactgtccatgtagctgataagtacctttctgaccaggatttgatcaaaggcttattttaactcagagtctctctttttccaaatgaaggaagggcatgcaagttttttctaaaatgtgggctatatggtttctgtggctctgccattatagtcagaaagctgccgcagacagtatataactgaatgagtgcagttgtgttacaataaaactttatttataaaaccaggcagacagtccacagtttgctgacccctgatactgtcactaagataactcaagagacaaaaactccaatcagtatttgtattttattgtccaactaagaaagactcagaactgataactctgggtgatgggacttgggatatttactgattttgtcatggttaaatcattgtgcttcattgatgcaacagagaactaactatgcatgatttgcctttcttaagcctggctatgaggaagtcagacctcacaaaacagtctcctcagagaatcctctactctgaaatacaaaaactatcattcatcattttatagaaataaagaacgaggagtccctcagcaaatgataattccacatggtaacacaggcccatgtagtggaagggatcagggcaggaccccaggagaattatctaattcaagtcctgtgatgaaattgtccagcttccctgtgttaaatggagatgatacaaacaccaaaaagctgcatagttatgaaaaagtatttaaaaaaaaaacctgaagtcctctattaacatgtagtttgactgacaatttatgaccaaaacagacaatgttaagtaaaggtttggaaggatctagatccacacctatcttttaagaaattattcctggcacaggcaagaatcttgccccagattaaaaaaaaaaatctcatagaaaaatcaaaaatagccatttaaagtattagaatcaaaagtcacaaaagatagctccttcttaagaggggtagactagttcatattttctccatggttgcgagagaagcaacacaaaatataaagatttaaactccttccctcaaaaaaaaaaaaaacaaaaaaaaaaaaaaaacggaacaaaacgatgaaaaaacaacgtgccacagaccgttagaaaaagtgtatggtgatgaaaactatcaatttctttaaagtcaaggccaatgtctttcttatgaattattctatttatttctactctctctccttcaaaaggttttgcaaggatcaaacaagatatatatgaaagtgctaggcagaccattaggccctataaaaatgtaagtggcattataattatcatcatcattattattacattgatcaactgaactactgctgtactaacaaccaatttttggcacacaaactttttaataagaccctaatctcccagaaggcagatgtttccagtctaacacagtgaaaagcacccctgttaggaacatggccactcaaatgccttttgaatttaattgaaatagaccccagaaaacagaagtttaaatgaataaataaaaagacaaatctagactcacgatgcacattagctctgagttttaagttgattgcctttttgcctcttctattttagcaggtcattatgttataaataccctcttcctccctgtgtttcagccccatataatatcagatgcagaaaaaaaaaacataactctttgttactgttagttatgggcataaactctcactgaaaaagtgaccaagagaaagacagcacaacgatctgggggagggaggaaggaaaggagagaccggtacagccagaagagaagatagagccaagaaagaaggtcgaagtggaatacagaggacaagtttccaaagacctgggaatctgttaagagatatcccctgcagtcaggggcggtcagtaaagtgctgagccttgactttgtaatgtgtgtattcctataatatcagttatacaaaattataaaagtcagactaataaaatagacaactcagaaaattttaaattcataaacacatcgctcaaggcaatcagaatgcagtcttcttaggatacaagcaaaggagagcgcattctcttggtaccaaattggtcccctcaatacttcatgttagttttcactcctccttgactaacaccatctagttttaaaaagcacattccttcataagggatcacttttaaaacttgggatccagcttgctgtattagggaaatacaaatagacatgttccaaaaatggtattgccattgatcattggtataatatggatactagaatttcagagtggtaagcgtattttaaaaaatggaatgtaactgcctaaaagtccatacacaaccatgagtttagccctttcaacatccttagggaatgaactttaattctggagcatttccactggacctctagcaggcaaaggcagtaacttttaattctggtcatctcccccattccctttattaaaaatgtgaaatacttctaggaggaggaggaagttggagcaaaaatacagaaaaatacaagatcacaagtacaaagttttctaagtgcacattacttgaaattctcatagtctggtcatttattttaagtaatgactctatgtgggtcccaatatcacactgaaaaatcatacagaaagtcatatccttcactaaagatgtatgtttagcaagacaaaaaacagtaacatattgtcttacagtatcattttctgatgcaaatattgtgtttctttcaaatgtgatatttaacacgccctaacgcgtaatacttttgtagccattacccttttaaaatcccctatcgaatatggtatcactatgctaaaggactgtccattctatcttgttcactcttctgtttgaaattgctaatataatttccctcacttctggtcatgtttgtttttaaaaaactcactattaatcttatttttcctttaagtaaaaaaatcattaccctgggataccaaaagagcagcttctgctcttcacgtttaaaaaaaaaatactgcttgtccactatgcttgtcttagaaaatttagaagtctcactaaagagctgaggaggaaaactgctgggaatgctcacagatacctgattttacaagtttttgtggaaagagctcgcctttagattagtgttactcagtgtttatgagggttgtttgtcaaggcaaaaataaggtacctcctccccacaaattaaagaatcaagttacaatccattatttcatttctgattgtttttctttgtattaagtgggaaagtggatactggataaaagttccccgagctaaaagactccacattaaaggctccaattagctataaatcagttgtctttcctactgggggagaacaagagagaaaagagagagggggtagttagggagtaagagaactggaagagcttccaaattaaattctgaaaaacgtacctattgcatacctaaaatttctttcagaggctgttagaaaaatcccatcaaaaataagactaaaatcaaaccttcccaaatctgagggttaggtcttttctcctgtgtagatcttccattttaagacctttaaaaagagcctgaagaggttagagaccctcataaaataaaacttctaagctgcatgctttccctgctcgttcctaaacccagacaagtgccacacattggcactattgttatgcaaacaatgcctaaaaggttataaccattaacgacctctcattaaaacggctttgaaaaatttgtcacaccatctaaaaaagctagcaggtacattaaatccatctaaatcgacattcaaaacacaaatcgccctgatttgtaacctaaaactcaatgcaagtaaaatctcaatattctgatgttgtttcttgtatatctcattcaaccactaagccagatgcaaacaatttacttctctacaaaatttatcttgtaaaaaagcacgatggaatacatctttaatcaacctttaaccatatgcatgtgcgtctatgcgtttgcgttaattgggagaagttgagtgtagaaatgtaccgaaaggactagaaaatcaaaccagagaactacaaaatgaactccaagaaacgtggttttgaatcccatctctctctcaccacctccctcaaaatgttgtaacattacaatacccctacgtttgtaatcgatcattttttttctatgtcgaatttgtggaaagtaaattcattttatattaggtagcagacgcatattcttttttaggcgatgcaacaacaaaaatcctgcttagcaaacccaagatgtcaacgttcgttataaaaaaaaaaaagtaagttcttcagttcaaaaccgaacatgctaacaaatattaaaactttttaagtttcccagggaaactgccgctgcctacaaaattcacatgaaacgctgacgttggagttactgtacttatcagtcaggtttccgtgaaatttgtcaaaccggccagagcgctggtgtcttgacaattccttacgggaaagcccctcagcaccctccgggctgtggaggacctgattgggaccaacagccgaggggcccggaaggcggaggaccgagaggcgacggccaggctgcgtggccaagctgacggggaaccccggcctccatctgaggatactaagcggttccgacgccttccccgcggcagtcgggaccgggagaatcggacagaaaccagcctcagagtccggggcaggagccgttgacggctgcccctcaacgctgcgcttcgggttgggttaagtccccarggcgtcctcagaccacggcggggcttcaaacgccccagtcccgaagacaggcagggggtccctctgctgcgccgggatgacaggctggccccgacgaccccggccccgtcccgcagccctcacccgctgaagagatcggggaaaccgaagaaggttctagaaagtctccgtggacgacgggcgctgggcggccgcttaccttggtgtacttaatttcgagattgggcgtgggcgacggcaggaggtgcagcgacgccatgagggcggcggggtcggccttcacctcgccgggcatctctatcttgctggaagtcatggtggcgggccgggtgtccctagcccgcggcgtggggcagtgcgggctgtgcgcgcggtccgcggcccgggggcgcgctcgcctgtatataggcaggtgtcaagctggggctcttcttattggacgtgagggccgaggcgcggggggctggtccatcctacctaggacgcccggcgcagcctccatttacataaagcccgcgccgcgcggccgggacgcttggcgcccacggtcaagtccgcccggcgctcccgccccccggccgcggagaccagcccacgccgcctccacagtcctcgacggtgggagcggaacttgcgccgcggcccgcgggcctcggccagccggacttggtctccgggtccctgggtcagagtcggcgggaggcgcacagcggccgaagtcgagcgagggtcgtggcccccggaagcggagctggcaggggctggcggggaccggagcggcccggtgctgcttcggagtagagaaaggccaggaaagtccaggctgcggagggcggctcccagctcgcccacgttccctcccatccccgtcccaggacccaccgaaccccgtcccccttcctttccggagacccgggagggcgtcctccgttctcctcctccgggcaggggcgccaggctctcggcagctacgccctctcccccgaccccccgactcccctcagccgggccgaggtgcatggtggccagagggtcagggagaggtggcagtgggtgcgagtccccctcgcctcgsgctcagaatgaggatccctgcgagcgggtcagcgcggggcggcccttgccaggcgtcgcccgcccagttgctgccctctgccggccgggaccgcccgggcggcttgcgctgtggcgggaggatatgggcagtgatcatccccggctcctccgaggagctgcatgcttcgtgggctcctttagttcttctcggatcccctcttccggctgtttcccctcctcacccagcacacccacagaaacactattttgtttttctgttgttccttacacgctaagagctatcgtcccgccagaccttaggctcattttactgtccctttgggattgagtttccatctcccccctaatctaagtgtttccaaagtctaacaagctgccctctagtctgtggatcggcctgcaggtgtaaaccaagaacctagagaccctgcctcagaatgggctttggactccgtggactaaatcaaggccgcatggaaagacctgcataagtcccttcccttccttactcctcactccaaatgtaagcttgacaggggcctacagtgttgataaacgctttttctacactaccaagcaacactgtgattctcgtctttttgttttgtttgaagagacagggtctcactccttcactcaggctggaatgcagtggcaccgtgacagctcactgtgatcttgaactgggctcaagtgaccctaccacctcagcctcccaaagtgctaggattataggcatgagccactgcacccggcctgattctcatcttaaatgccatttttagagccgctggagtcccatttcttgggcgttaagaaaacattaagcatcagccagaaaacatctttccttagatactttgagtaactaaaactgcctaatgctcagcgytcagatgctaagcaatagtgaaaacagacaaaaatatttcattttsgtattaggtttatagaaataagttccagcctctcagaacccaaagtgacctgggtgaatcgttttcatggagaaactacagaccttagcttgggcagtcgagggatctgtactcagggaatttctatggccaaaaattatgacttaataacagtgtatgctcataagatatacttttatcaaagccttagaaggttagagatacaattgagaaataaaaaagtaaaatcttagagttcaytggggagaaagagagggttccagcaagggggaacwgtgatacctgtggaaaaacttatcactagttatgagaggctgtggggaaaacatgaaaaagagccataacaacatgagctgagtgctccaaggaggacgcctactccctgggaaagctgacctttggctgggtcttaagggagaagggaggcttcaacaagagcaaaaagaacactatagaaaaggtatagaggctgggcacggtggctcatgcctgtaatcccagcagtttgggaggccgaggcgggtggatcacttgaggtcaggagttcaagaccagcctaaccaacatggtgaaaccccatctctactaaaaatacaaaaattagctgggcctggtggcaggtgcgtgtaattctaactactcgggaggctaaggcaggagaatcgcttgaacccaggaggtggaggttgtagtgagaggagatcttgcactccagcctgtctcccttgtgccttcctcagttcctaaaacagcgtagaacacataataactatttaataagaatttttgttggttgatttgagcaaaagacagagcacttttgacaacttccaccgtaagtgaaagtaacttccttcactgcctgattaaagaacattttctcctcttgatcttaaacttcgttttgcttttccccatcggtgtttttttgtttttttgtgttttttttttgagacagagtctcgcactgtcatccaggctggagtgcaatggtgtgatctcggctcactgcaacctccgcctcccaggttccagcgattctcctgcctcagcctcccgagtagctgggattacaggcatctgccaccacacccagctaattttttgtgttttggatagagacaggatttccctatgtcagccaggctgatctcgaatgcctgacctcatgattcacccacctcggcctcccaaagtgctgggattacaggtgtcagccactgtatctggccaaaaaagatatatattttgtctatattcagctcgtgacagcagccactttttgttcaagcccccttttttgtttttttgagactgtcaccaaggctggagtgcaatggcatgatcacggctcactgcaacctctgcctcctgggttcaagcgattctcctgcttctgcctcctgaatggctaggattacaggcacycaccaccatgcctagctaatttttgtatttttagtggagatggagtttcaccatgttggccagactggtctcgaactcttgaccttaactgatccaccctcctcggactcccaaagtgctgggattacaggcatgagccaccatgcccggctgttgttcaagctttttaaatcaaggtagggacaagatgtagcggaaaagaacagtgaattataaatgcttctttggtgttcatcttcttggtttcagtttgtaagatttacaaggctattacttccaaggctgccttaacacctcttctcacattcttatttcctcttctctttcttttatcatctagttttagtgttttctcatatcctctacagatttcacaatagttaagaagacagtctttggccagatgcggtggtttacacccgtaattaggccaaggtgggaggattgcttgaggctaggagttcaagaccagtctggacaacatagcaagaccctgcctctaccaaaaaaaaaaaaaaagtatccaggcgtggtggtgcattcctatagccctagctactcaggaggctgaaagaggagaatcgcttgaagcaggagttcaaggttatggtgagctatgatcacgctactgcactccagcctgggtgatggagtgagaccctgtctctaaaaataaaaagacagtcaactaccttcagatttctaacaatttgaatttcagccttttccccccaatttggctaagaaactgtttttttcccacctttacagtgtttctcctcccaccccccccattctgtaattatttattgcttasgatacatcttgtttgaaaccccttgcataagggaacctaagctgcagcatgctgtatttatttccttatgaaaacaatttattargcctggtggagccaatatcctggagttgcagaggagaaaaataaattcttgcctcatatttcctcacctaaataatagaatgcaaagctgtaattttaaggcatcagctttatgtgaagtttgactttaagttatgaaaccataacartttaggtttcttgttagctgcagttaaggggaggaaagtatttgttaagttgagaactagtctttagaaatcaatraagggaactaaatgcagctcaaagatccctctcaaagaagatgcacttgattttgacagtaaccgaatgtccagcttgaatgtcaastttctatgtttagggkctrtttcagcctcaggtggccctgcttaattgctttcctgttcccattactaaccatgatgacagcctacctttcctaacagatacacttgcattttaatttatcttcaaaaataaatcacacattatagcattcccctcttctgggctaattgaatcagttccttaaatgtctctacatctaatgatttgaaagaggcacattgtttgaaatatttaaaaaattagggccctyaggttgtatgcagaatgatctcagtgcttatttcagatataagtgtttcctaatgatctcattcatctcaaatgggatatgcctggccactttatttgaaatgtttcctgaaaactctaacaggaaagcttaatgcaaaatatatttatagagaaatggtatttaatttattaacaaaagcttataaagagctttacatatttttatccagaaatgcttaatgaagtatttgggacccattatgaaaacttctataaaataaatccacttatatttttatttaacctgtatattaactttttatgtgagatctaaactctcatttaattatccttttccttctaacatccagaagaaaagaggctgagactgtggtatttattaaccataaaaattctctagatattaagttcctcatttcttgatatggcctctggtcactatattctatgagaagaggtatttggagttgcagggagtagagtcctaattggttatgactcaaaaaactatgttttgatacaaaacacagttcttttcttttaaaatataccctctacttttcagggaccccggagactattttaaacatgggaactagatttgcctttgttgtaaggcccagttccatttcgtatatgttcgagaagcttcaatttgggtactgggatgagcgcagtacttcatcaataatcacacttaacagacaggaagaaattaaaattccagctrcaccgccttttctgaagggcctgagggaaaaggcattggcgccccctgcagttgatggtgtgtatgtgcaastgagtattgtccattcaaatagcttggattcaatgtatttttatctgatactggtgagaaatccttaagagatgttatcatttaatttgaatttgtctggagaaaaaaaatctcctagagtcagacaaattttagattttagttagtttaggaggactttcttttgacttacaggaaaagaacaaaagtgtttcttagccaaatttaccgtagaaagtgcaatactgagaacactatggtcccactcacatagtgttcagagcactctgtcacagaggaagttgcatgagtgtgtctcagattggaagctactgtttttatcttgtgggtgaggaagaattattaatagacagattccagaatttatttctcttctcgctcagttaaggacttggcgtgtaactaagttgtctgcttttttctttatttcacatttcttagctttcctttttccttttacccttctaaaatccgtcaattctacaaataactcctgttattattaggttggtgcaaaagtaattgcgagttttgccatttaaaagtagtggcaaaggcctcagttactttggcatcagcctaatacttaacataggaccctccgattcctaagcttcctccccaagtgcatctgcgcttatacagccactcaactcacaggatctttggacataaggaattctcacatgaactttggcactattcggggcagggatctgtatttatattcattagaaaatgaggctaagtgaactgtctctctctttttacatgctgaaatgggccactgaaaagataacgaggaacactttagacgtcctgacaacagaggaggcatggcagcctcttttgtctcaaccaracggtttgctgtgtgaaaggcatagagtaaaactgggaggcatttagggctggaataggtacccaatttggacatctaccaccaaatggcaaggagcggtcttgcttcaggctgtataaccccactttcagagcatctgtgttttcctgactgcagttcctaaacctggattttttttctctgtcagtcatctaagttcaattgaacaaatattcattgagcatatactatgtgccaagcattgacaaagagtctatgaagaacccaacggaagtttgtggcacatccctaccctcaaattcacagtgagggtggaatgacagtaaccaaatctgtgaaaatattcacatgagacaggaaagaagtcagaatatccagtgtacaatgagagtgaaagaggatgtctaaaaggggacagcccattcacaacccacacacaacccacgcacaaatatttttgggggggcctcccatgggcatttataatcttctaagtgctccgaagaacatgtgtcacaaaagatgaagagaatattttccagaacatagcccaacaaagaacttctttgacattttttagtgtaaaggtaactgacggtatctaccaaattagcaatttgtaaaactggaatttctaaaagcaaatacttggagctgagattacctcccacttcccaaattcgagttatatgatctcaagtataataccctttggtatagacctagccagaagagataatagaggtgaaaacaagggcagcttattttttttccattaaaagcattatatataacactatgtcatgtttctagtgcatacacacctactgtagagaggtgttgccacctactgttgtttagtcaggggatcagacagtcatggaatagaccggtggttttcaaaccaggttccaattgtaatttagggagctttacaaaatacggatgcctggtcgcgcctccagagatttcaataagtttaagagggagcttaagggattgatattttaaacaaactttctgatgtctagtaaggcacagcctggtttgagaaccactatttaacccccagaaggttaaccatgtgggattacttgaatccactctaaacctctggattgggcagatggattctgtgcctttccacttcgtagtgctctttgatttgctgtttttaatttagtatttgaaaaacacatccagcctcaaatggattgacctttctgctaatgtatttcacctaaattagcagaggcaattagctaatttatattggaattgtgcactttccagttcacatttatcaactcttaaatgcttgatctggtgttgcagtttaaattttttattattaccctttaaatctgaagtaatgtcttacatctaattagccaaacttacatattcaattaatagattcattatgggctaatgaatatggaggcagcactagggcaacatctgcctgccagttgaaatgactgaaacttttctgctctgaagaaaggaaagagtctgttctataacttaaatagcttgaattttccgttttaacatttctgagtactatactgctcttaaggagttttacggacctgccaagataggaaagtcaatatgctgtccagagaaacctgcccttgtagaggaatatgaaattcaaaattgcaaagaaaaaaaaaacacatctgaagacattttttagtataaaaatgtacaaatctagatggtcactccagattatggagtttttcctaacttgtgtttttcataacaaatgcttgagaaaaaaactaaatgagaaaattaatatcacaaactaaacaaaatgtttagtataccttaggatcactccaaaactcacttgatttcatgatttaaagatatgtccagacatactttcaataatttaatgttctatggtcagtgatttttggaatctagataattcagagatctaaaatgaatttatgtaatataatcagttattaacattctggcattttatttctctggttataaagaaatagtcatttttagtaattacaaaaagccacgcacttcaggaaaggtgggtgagagctagaattcacttgaaaaactatttttaaagatggcaagactatggggaaaataatcagaaatcattttcaaagtatgtgatatcttcgacatcaaaacaggagttgaacaagtcactttggcttgatgtctgcaatgtgacagaaagaggatttgaggtcgtgtatgtgctactctactgaggcatgaaaagtttgttgttgatttttacactccttacgttcaaggtgacacttggattataaaaagactacatttcttaccatgaattatacagatgcaaagtgccaatatccttgtgtcaagtgcactttatcaaacattctaaaatatgaattactgctatattcatgtgtttgatattgagggcctcttatgtgcttagcactggctagataccctggggttatgaaaaagaaaacataaattcttcttatggctgaagaaatttgcaatttgattgtcataataaaagtcttcataattgactttacaaatacacctatgcccacaagattagatttactgtgttttaactgtgttttacccttttcagtatctataaaaaaaaaagtacacatgttagtaaatcttccccatgctgctctcactagaagtaaggagcacaggaaatgaaaacaaaagacaaaaaaacatggcacctggtgtgctcagggggactggcaggggaaggtataagtagtagcacctgagtaggaagtgtatccgccctggtactcatgccataaagggccctgcagttataaatacacaaaaagcaaatttaataaggaatacatgggaccatctgtcacttgcgatctgacacaggctgtttcagatgtgtgcatcatctctaaccctaaacaatcagtgtcacaactaacactgttgaggccccaaggaagcgctcttcctcatctctggtcctgtgttcagaaaaagaaagacagcatcctttgcagggaatactgggaagatcagtgtgtcaagcagctggcatcattagagtgtggggtgtcaccatttgagcagtgcgagtacgaaggtgaaagacacattaatgaccttatcacgtccttcctctcagatagcatgaatgtacccaattcttccagagtgggagaactgtttctcagaggtgctatgctgagtgtctagattttcttgcttctctttgtgttttagttgctggtttctggggtagtctcaaattaacatggtcttctcaatagctctgtgtggtgactgaggaatattctgcaatattaaacaataaaatattcttacatttttatatatgtagatctagacataacatgtgtgaatttgaccttttacattggcaactgggttacacattaaactctagaactgctaatagttctattcttataaaaatgtttaaaagaagtacttacattttaaaaaactgaataaataacatattttaataattgtatttaaaagtttgataattattaattttcrtttctattttgccttttaattttaataaaaattttaaatattttagaaaaaataactttaaaaactataagagaaataatataatgtttctatttttaattaattcacattgctgatgaaaatatattcatatttgtatacttcaaatataattcattttttaaagatcctttaaaatattactgtcagtatcaccaaactatgtggaaaccttgattataacaatattgtgatttgattaaataaatgcaacaattgcattttatcaaataaatatgtaatttatgagttacgtatatgtttattttattacttaccctaacattgctggcacatcagcagaacaataggacatacacagtcataattaaattcagcagtcttgatattttgttttcagtcaagtaaaaagtatagctttacatatttaaacattttgccaccatgaagctctatttgtcaaagcagaagaggacattatatttaacagtttttaagtttagtttaagatggtaaaatatttaaatgtctggtttctgggtctccatttgttttttttcccacaaatattaggagtaggcctagataaaaggagttgcttttcattgtaggctcaagagactgatgtttctctgtatcctgattccatgtaccttttctgaaataatcagtttgcactgttttcccttgttgactgtcctrtaataaccttcctgcatacagttgtccctaggtatccacaggggactggttccaggaccagtgataccaaaattcatggatgctcaagtccctgatagaaattagcatagtatttgcataaaacctatgcacatcctcctgtatacttgaaatcatctttagattccttataatacctaacccaatgtaagtgctatgtaaagagttgttttactatattgtttagggaataatgacaagaaaaaatagacaccagcctgagcaacatggcaaaccctgtctctaccaaaaatacacaaattagccgagcatagtgggtatgcctgcaatcccaactaccagggagcctgaggtgggaggatcacttgggcccaggaggttgaggctgcaatgagccgtgagtgtgccactgcacctccagcctgggcaacggagtgagatcctgtctcaagaaaagaaaaaagaaaagacaagacaagacaagacagacacaaccatccctttttgttttgcagaatattttccattcaaggttggctgaatccacagatgcagaatccatggataagtagggccaacaatattttttaagttctctctgaaaagatatgcaaagtagttccagaaacatgtttgaatttgaactcagcacattaattggatcttcatttttaagtggttttcatgtattgttaacaggctgtgtcaacgttattgatttttctgtatctcaataattttttgtttgtttaccttattaaataaytgaaaggacactggatcaggacccaggaaaccaaaactcaattcctagttattctcttactcartatgttgaaccactgtaaacgtccccaacttcccaagagaaattatcatttcccaatagaaaatgtcaatgttaatatcagcatatttccataagaatatgcgaaagcttatattagaggatctttttttaactatgaaaggaaaatatctatgttgcaaagctattcacaaaactgtggaataaagaatcagggcacagctgagctaaagaagttgtaggataagtgagaaattattattacattacatcttcatcatccaacaaaaacaaccacagcactgttagagaatgcaaagtataaagatgcataaaccgttgtttcacatcaaggagctctctgtgcaggccagcagggaacacaatgatggtcttttccctaaatagatgtgcagtgctatggagagccaaaagagaaagtggtatgtcaccatggggatcagaaggcatttacctggacctgcatgatagagaggaagggacataggcaagactagtgtattggttggaagactggggcaaattttggaaaaraaaagtttggctacagtgtggcacacctgtggaggaaaacctaggacataagccmgcccagataacaagctaagaaatttgtttaggcagaagggggagctagagcaaatcagttcacatgctctctctgtctcctgtttacactgtagtattacaggtgttagacggtagcaagtcctaragaagtgtgttgtgtaagtcactgtcattcaacattgtaaacagctaggtaaaagcagaaaaagttccaaaaggtctgtgcatgaaatcaaaggatccttaggcatgggagaaattcctagaactataggaagaggaagaaggtgatgaaaaagaaagggttgtgatatgcctgaaggtactcactcacacwgcagtggctataacaccctgcaagaaaagtggtctctgttaaccctctcctcatcaagtcctgcatcttctgtttcrckatcattccccctatggagtcccttctctscagtaatgctactgcctttgctgtggtcctctgcatctcttgagtagcacatgcagctctgcaaagttatgtactgatgagaatgaatttcagttaaagttaaatggcaccagatcagttcctgtgggatatgagaaacaagaatgctctgagccactgatgggagaaaaggatgtctggactattggaataatttgttcttactgcttctggacttgactgacttcagtccactctttatagtgccaaaagagaaaatttgaaagcagctgattcgatcaagtccaaccagggacttagaggtcatcttttccaggctttcccaaacttatgtcatcactcgcaaatgaaagagatccccaggttcctcctgggcctgctggatcagtctccagggaagggcccaggattccgtgtctttaacgacttgaaatcccccaggggatcactttgctcaggcaatttggggaagcactgatggagcccatcaccttttatgacagatgaggaaactcagatcctgggagacacatcagttacagaagtccagaaaataagggccagaatcagaatggagaractggaaggcagaatagctgtggatgaaactgcagaccttatcatcatctcactggtgtctgtgccagagccccatctgagattcaccctggggctcctgggagtgtgggatcctggcagtggagtgcctccctcccactccttcagccctgtggggccacaacagctgcaactcttgagcagtgggaaggaagaaaggaargagaggggaggaaaatcctggactgtgtggccactgaggaaccaggatcaagcagagcctggggtacttttgcatccagcttctatttgtccagagacagctgaagatgaacaagatctgcytaagggcaaatttttgagcccagcagtacttatccctggtgcttccagccttccctttttgctttctatctcccctcatgagtagcctcgcctcttcttcccccagagtctcctgtgctcagccttttcttccctagagccatagaaatgtctctgcggttgtcatccatactttgactgaaaactgttttgctgggctcagtatttgttctctccagcctttccccccgctctgtcttaagtattaatataaggcctaaaagaataaagtatttcagataacagtagcagtgaaataatatttgtaataggagaccaagaatcccaacttgcccttgaaattatatttttccgaagattgccttaaaattttgttcagccattcaacacacatttaatgagcagtacctgtataaagcactgtgttaaatatttggcattcaggagagaataacgggaattcgtagaaaaatgaacaaggcctggtccttccctttaagttgcccacagtctggtgaggataacaattctaagagataacacggtatgatggagatatccataacatagataggagcctaggggagggcatagttaacctctgggccaggacgaggctctacagagaagctacaattgaatttgaacttgaagcataagaagtttttcacttgggtgttaacagggtgaaggaagccgcatatacaagggaacagaaacttggaaaagtttatcatgttcaaagaaaaaaaaacaacaacaaccagaaggtccatatggaaagagagtagaatgaatggtaaagaatagatggaaatgatgcttaaaacgtaggctgctaagtaattaatgtaacagactgtattttccaaagatggcctcatggatacacattccatcccacagtatggagcttacattccttcatgtagaggtgaggtcttcttgcagggcttcagacatcacagagcaataacaagtcagccctgctgtattctgccctaatgtctacccacagtaaacatgagagataataaatgactattgctgtttgaagccactaactgtgggggtaattttttacacagcaataagataacagatacaagtcatgtcaaggagttgcttgctgggagaaataattttttttctttataaattaaaactaacaaacattgaggaaccagtgaaggtgttttttgtttgtttgtttgtttttttatcaggtaatggcctacgaattgcaaatgagaaagacagacctggtgcaatatggaaataggtggtgggggaagggctgcttaggggctgggaaaaccgagaggaggttgtcagagttatccaggccatgcaggagggatggtagggcaggaaagcaatttccatttttaaggaatattttcttaatttcagttttgttttggaactcttttactttcatgtaaccaaaaagtaagaggcaaaatgcttgagctgattctctaccactccccactgtggagaatcatccttttcttctgctcccttatatccagatcctagactttcagtctattgtctattgatgccctcgttcctccctaatgatgtctagtggcaaaaatcctgctcctcttaatcggtttctttctccttttcttctccccacgtttgaaggtcatgatgtcattctcattatctagacttcctgcttcatctagctcatcagcatccgggttcagagggaaccttagtcctggggttctatagtatagttaacacgttacaggacaggggtcccgattcagaccccaagagaaggttcttggatctcacgcaagaaagaattcagggcgagtctgcagtgcaaagtgaaagcaggtttattaagaaagtaaatgaataaaagactggctactctatagacaaagcagccccgagggctgctggttgttcatttttatggttattttttgatgatatgctaaaccagcggcggattatttatgcctcccctttttagaccatatagggtaagttcctgacattgtcatggtatttgtaaactgtcgtggtgctggtgggagtgcagtagcgaggacgaccagaggtcactctcgtagccatcttggttttggtgggttttggctggctcctttactgcaacctgttttaccagcaaggtctttatgacctgtgttttgtgctgacctcctatcttaacctgtgatttagaatgccttaaccgtctgggaatgcagcccagtaggtttcagccttattttacccagctcctattcaagatggagctgttctggttcacatgcctttgacattactgcatactatttgacaccaaagatgattgtaaatactgaaggaataaccatgtatttattaacacaaatgatttagttgcataaagtattgttaattgtatgatagccttcaccacctagagcaggactctttaattgctaccaattgtctggtatacatggtagagtgcaaacatctaagggatatttaggaaagtgatgcaggccaaaaagaaaatgatttaaattttttctccacctcatttatgttttattcttcctaccaaatattagactcatctctaaatttaagaatcgttggcaataaaatattaattcattgtcatgcattctttttcatcttagtaggatgttttattcaacttttctggaatttattgagcaatttctctctactagaatcttactcattatcttactcaatcctcacatcaagtccacagtcttattttttattttcattttacagttaagacaaccttccccaatctaagttaagtgacatcctcaaggttaagtggctcataatgataaatcagggccttgaggctagatattttgactttccaattcagaattctttttgctatatgccagaaaatgtggtggatttaggccgtagctttacagagacagtaattaaaggcaaactgcacagttataatcattgcatttttttttatccacaaagtgacatactgagcaatcatattctaacggttgggtgactgttcagatcttaactgctaattcttttaatatgggcaggctttcactagtcctgtgcaagggtctaccccagatctcaatccttctctactaggtcgtgaaaacttggcagggtgtcgtgatgcttaacaacccagattccggaaccaagtatttgggctcagattctaactctgccacttgttagttctgtgacctggagcaattatttaacctccctatgctttagttcctttgctttttaaatgtggataatactagtgcctgtttctctctgtctctctcttttaggttaaataagtggatatagtagttggcacatagtaaatgcgatttaagcattagacattattattattgttgttgttattattaccacaattccagagaactaacagcagtaaataaataattatgggctgggcacggaggctcacacctgtattcccagcactttgggaggccgaggcgggcagatcatctgagatcaggagttccagaccagcccagccaacatggtgaaaccctgtctctactaaaaatacaaaaattagccaggtgtggtggtgggcacctgtaatcccaactacttgggtggctgagacaggagaatctcttgaacccaggaggtggaggttgcagtgagtggagattgcactactgcactccagcctgggcgacaaagcgagactctgtctcaaataataataataaataaaattaaattaaataaagaaataattatggaatcagtatggcaatttaataccacacatttatgtgtatatgtatgtgtggatatatgtatatataagtgtttttttttcttttatagcctaattttccagtcaagatttaagggttcccattgtctgatgcttgaatacttgaagactctctttctctctttgatcatcatggtcagtaggcaaaataagtgatgacttgtactaatttgctagggcttccataacaaaataccatagtctggacagcttaacaacagaaatttattttctcgtaattctgcatgctagaagtccaagatcaaggtgttggctaggttggctgcttttgaggcttatctcattggcttgcagatggctgccatcttgtgcctcttcacatggtctttgctctggtcatgtacatccctggtatttctctatatgcccagatttcttcttcttataaggagaccagtcagattggattagggcgaccctaagggcctcattttaattcaatcactcctttaaaagtcttgtctccaaacacagttacattctgagatagaggggttaggatttcaacacatgaactaaggtgaagggaagggcacaattcagtccagacatgtttatttagcctattttatcttgatgtgtctactgggtgggagctgtgatctttcactaatgttatataatttcctaggatcacccaaggatattgtctgtggcaggaggagatttgcatagacacctggttgaaatatggtggcctgtaaaatcctcttgtcttttcggctggattgctgagttctaggggaagataagtgaaaagcagagccagccctgaaggacacctgtgcaacttgtcattgtcctatatgcatatatgcaacatataaccaggggggacccagaaagtggatctgctggaaaataccaaaggtaatcagtatgttttctgtggttttattttatttttagggtcttgctctgttgctcaggctggagtgtagtgatgcaatcatagctcctagtaaacttgaactcctgggctcaagtgatcctcccatctcagcctcccaaatggctgggactacaggaatgcatcaccatgcccagctaatttaaaaaagaattgcaaagacaggatattgctatgttcccaagctggtctcaaactcctggcttcaagcattcctcccatttcagcttcctaaagtgttgggattacagacacaagccaccacacccagcctatggtttcacttcaaagggttctgatcatttaacttgaaaatgtctataagttgactctttcaagacagtcattagagtacctgaatagaaagaaaaggaagaagattggaaggaatggctaagaatgggatgacagagcaaggaaagccttgattcatatcttctctatctgtcagctctgacatgtgcaagaaagtttatataatggtacaaactcctgcggtgggcttaatcaactgactctaatcattctattactcagtcctctgcctgtcgtaacacccttgggggcttgactctccttggtagcagccatcagcagggttagcaattaaggcaggagactaacactggttattagttattaatggcctaaggttacacaaaggaacttttatcagctattgataacctaaattaattcaaagggtataccaggagaaagtgttccaatgctggaattgcttcccatgcagcagtggtctatttttagcctatgggataaggtggattcacaaatactaagcttatttaaactgattatgactgcattagtggaaggtgtggcataaccacgcaaccaaatcattctcagacttgctggtatggtattgttcgttttatttacaaaccaagtacatcttcttttgacctcatcttttgcctacggcataaatcttctgaaactcctccctagacctttcccaaggtggaggtagcttgataacatgttggttggcccctagtaaagttttacctaatttgcaagtggcttttctcactaacatattagtaattaaggagaggctgtgtaactagggcaatggggtagtgcagttcattatcagcaatcttcaaaatgatcttatctgatttcctcgaagtttccccaaaattcaccaacttcacacattcttgtcctactatttaccttaaaacattttcctttccaaaagttgatgtcccttttgatcagtaatacttgctacttcttcacttttttattctttgtaagatttttatccacttacagaaagaagtgcat

SEQ ID NO: 97074 - DNA, 12438 bp, Homo sapiens
catcaacattgactttcacagggtccggcggaactctaccctagggcccttcatcttccgaggctatgactcagcacctccaggcccttggaccctggagaatgacagccacacaagtcagcaccctgtggtcaggacccctcctaggcagaggcaggagccccacacagggcatgagagctcctgcgtgtacacagggaccaggaccccctacacacgggagctgagacaacctacagggccaaaaaccctccacaggggctagcttcagaggaaaggagcatcctcacacagcagtccagatgcaccctctgtgtaggtgccaggtcccaccttacaaatcacaaccagccatggcccctgaggaccaggagtcagggtctctggcagggccaggatccctgaccacacacagctgggcttagagccccacaccaggagggctgccctctgccctcttccatgccatgctgggtgtgggggggggaagggtttcccctgcagtctgtggagctctgctctgctgaccagcaggagccatggacaccatgggttccattccatggaggcaatggggccgcactggggagaaacctggcctgaggaagggcctctgctcataccctgtgccctaatggcacaagatggacaggtggtgaggtagagagggtgtcgtgtgcctcctccccttcattgctactctgaatggacactgatcctcagaaccacctggagatttgggaggctgggctgctgttgcctgtctaccgcgcactgcagctgcacttcaactgccggcggtgggggggcccgaggcgagcagactcggagcacagcctggacaggcagcgccaggctatggaggtagactcgggaacaaggtggggtggccggagtgctcccacggaggtgagagagagcaaggtgagggcagctgggtatctcccacatctgtgcctccccccagatgcacgtggtccacagtaacacaaagtaccagagcatggaggaggcaccacgccacggtgatgggctcgagtgcaggccctgctgctggaggtgctgctggcggtgaaggcagggctgtgattctatgtatgtttccaaaaaaggggtccatggggatcctggaagtggacaggccaggcctgtggagtccgtggggggatctctagggtctataggatctgtgggaggatggggcggtgggaatgcctgaatcggcagggccagtggcggcgagaaccctccaccccatttcccagatgccagatgcctcctgccactgggagcctcctgcttagagtaccccagctgagttccctcttcagagactccctcactcagaacccctcgcacttggagcccctcccaggagcaggactgtagcaacaccaacttctgcgccatagtgtcgggcttgaggaaggtgcctgagccaggtgaggagccaccgggtcgttttccggctcaggggcggggggtttgctggggatggcaccagcagggcacagggaggctggttccaatccccctccctctgccgcccggggctctcagtgaatctgatgtccaccttcccgctggcgtcgatgcggcccaacacctcgagctactgtcgcttcgctgggtcgctgaccccgcctgactgcgagcccacggtgctctggaccgtcttcgaggaccccatacccatccggtgggtgcaggtggagccaccgtcccccctcgccccccacacccctccccgggccttgcctggctcctcccgcaggcgctgcccctctcccaccccgttttgatctctttgccctgcaccctcagatgaccctgttctacaccctgccccaggctggaccctcccactttcaccccataccgctcacgggtaacttccgcccccagcagcctcttttttttttttttttttttgagacggaggctcactctgtcgcccaggctggagtgcagtggtggaatctcagctcactgcaagctctgcctcccaggttcatgccattctcctgccgcagcctcctgaatagctgggactacaggtgcccgccaccaggcccggctaattttttgtatttttagtagagacggggtttcaccgtgttggccaggatggtctcgatctcctgacctcctgatccgcctgcctcggactcccaaagtgctgggattacaggcttgagccaccgtgcccggcccacagcagcctcttaaggggcacgcagtcttggcctctccgagagcctcggtccccgcagcagccccctgctcttcccccaccctagcagttgtgcactgcgctctgatgggcctggggctcagcctgtggttctgtcaaccgtgggcgaccctccatgtgaaataatgaaataatgcacagagtgaccttagcctaatgtagcctggagggggtgggtgcgtgacccggcgtggtcccccattgcaagaggggcatttcctgccctaatcccactgaggcctcagtgtgcctgtctgttccgtgggagccctctgagtgaccctctcctacctcagcagaacccgggcctctccaggttcctctcagagggagaagggcccccaccctcatcctatacattgtgtctgaatcccctggtcagatggaaggagaacatctagcagtcagaaattccaccattaggccaagattacattattttattttaaaactaagctgggtggccaacccagggacaccgtgctctgctaaatgatgactccagctacatttcccgaggccaagagatgagaagctgctggctccaggctccgctgcaggctgccctggctgagcgggtgctgggcaccgcggagcgctgcctggtgctctgaagccatgccccagtgcctccctgggagttctgctgtggagtctgtgtggagggtgactctggagagatgtttgtgtcccggtggctgcctgtggtctggctaagtaaaggggtgagtattcttggtgtcactgtccaaagcaaagttgtgtccacgggacacagactaggtgaggctctgtgtccaggtgatgctgtccagtgagagggggttgcagtcagagtgaggctgaccggaggccgctgtccaattggtgccgtgtggaatgtgattacatactggttgacaccatcctgagggccatcaccagctgagtgtctcagccgccctgtgtccctgggttctgtgctcttgtgtgtggtttgacactattccagtgcgtggagaccctgcctcgtcactgagaccttgaaagaaaaagaacctgcagtcaccccaaggaagaggagtctcggctgttcccctggaggctgacccagccctggcccaaaggctgacccagacccaaggcccaaaggcccagctctaaggtccaaaggggctccaccctgttctctagccggactcagtctctcgcaaggaccccggctcccagccgcactccccagacgcacgtggcccaccctccgcccgtcccgcgcccaccccctccctccagtaccggagccctaactggcggcacccgggcacccttttgactcagagccacgctccacgagggggaccgatctgctcacttgccccgtcctgggggtaccagagtagccagcgcgacgccttccgcacctcgcctaggctgcccttgtgcggccgccctcagtccccgccaccttgcggggccccaggcggcactggcatcttcttgtggttcttcctgaccggggctcggtgcgctccgcattctgctgggccgtccggggcgtcgtctgcgggcctggaggcggcgaccagggcgctcacggtgccgagcgtccgcagcagggtcgggccgcggggcgcggcgcgggggacggcgcggggctcgcggcgggcaggcggggacggcggcggcggcggcagcagcgcgcgcagagcgtccagctccgctcgaagctccgcgcgcagcgcctcaatctcggcgcccagctcctcgcgcactgccgcgagtccctcctgcagccgccgctcgctgacctccaggacccccgccgggtaggtggccctgccgcggggctccccgcatactgagcacacggagccgcggctgtgcgcgccggtcctctcgcccgcgcccgccgccccggcccccgcacgctccaccagcttcagcagccgcggcacctcggaccgcgaagccgcttcggcccggagctggccgagcaggcgagccagccggcccggggctcgggcgtcttcctggcccggcccattggattgcggccccgggtcccgccggcggcccgtgacgcgccgcagcacctcgctggctctgtacgcactacgcgcctgggcccacgggcggccgggcgtcgccatccgccctgctgcctccaccgccgccagcgcccgggatggccgggagccccaggctgcagcctagcgaccgctggggcccaggcgacgcaccgtggagggggcccgcgggacggctgtgggaacgaccaaagccctgggggttccggtctggggcgcagggaaccccggcagggccgggtctcgggcagcccggttcccaggggaccctgcgggaacgacgacgttgtgggcaggtcctcacaaagggcatggcccagtttctgggcataggtgacatggagcatcgccagccaaagaccaggcaccacccgctagacacgagtcaggaactgagctcacattttacactggaagctactgtctccatcatagtcaagggaaagccaggagtggtcatggaccccacagcccttttcaatggctcagggcgacgtccttccatgtagtccaggccattatctcctcaccctgtcccctagtccacacagctggaggaatccatccaggtggcatctccagccccaagctgctggcccttccatgcgagctcttcagggtctcccttactctccaaggcggtctgcctagggcctctggaaatccctggccatctcaagctgggttttttgttttgttttgttttgtttttacaaacaggatcttgctgtgttgcccaggctggagtgcagtggtgcaatcatagctcactgcagcctccacctcctgggctcaagcgatcctcccacctcagtctcctgagtagatgggactacaactgtgcaccaccatgcccggctaattttttttaattttttttttttttgtagagatagggtctcactgtgtttcccaggttggtcttgaactcctggcctcaagtgatcctcctgtcttggcctcccaaagtgctgggattacaggcatgagccaccatgtccaagcctgtctgtgtctttaacctcctctaatccaacagtcttcttcatccttctgggtctttgcacagttcctctccccccccacccccgccattttcctggtggctctcacttttcccacttagatagggaaacgttccatgaccaccccatcccacactggggacctcgagcccctcctccacagcacccttcacagttgtatttaaatgactctgttttccatccacccactgtggggtctctgagcccagggctgggtcatttctcctgggccgagtgtggcactaagcatactgagtgctagcctgcacagaggccaggcccgggtgggccccaggacacagctgtcagtggctgtcttgccatggagtgagtggatgaatcagcagggctgggatcctctcccattttacagtaggaggctggggagaggagctggccagcccgtccacctctgcagcctggcatctgaggccctcatggcatccctgctggtctgccttcccctgcagcccttccaccctctgtggagccctcactactgcaccctactccttctcaccccagtgcctctgcataagcagtgctgcctgtggccgccacagggccctaggtatgggcagagagtagtatcccccacacagcatgctgttctccctgtacccccaggggctagttagcactctgggtgccctggacyctggggcctccctcagcaaattgtggaggktggcctggcatgaatccaggcagrtctgggaagggacatggcaagacagcccctggaagctgtgtccccgggtccaccgggatctggcccctgcagrtcagtgcatgtgtgcatgtgttgggggggggattgaggggaccgctaatactgtcctcaagcagctgctgaggagaagactgggtccctctagtcatgttcatccactcaatcactccctgcagcccgtctcyctggaaggtgcaggaggaggtgagaattgggcactctgtcaacccctcagactcccccattcctgctgastcacccgtcctctgggacctccagcagctggctgtgctgatccctagagcctcattagccattctctccctccccccagtcattaaaacactgccaacaagagcgccctgggttcttttccccagccctactggagacgggctgtgtgacccaggggctctgccctctctgagccaagtcttcacctgtgaaatgaagagatctctgaggtccccaggacggatgacagggaggcctggacggtgaagaaggtgcaggagagagtccagatttgcagaaagagctgttagttttgtgatctctgcctggaggtttatggacaggttggaagagaagctgagccattgcaatgagtccagattagggcttgttcctgcaggggctacagatgtgggggctggcacttgtggcagagggttccaaagtcatgggcatagagaagacaggttggcaggagcaagggcagaatgggagcggggtcctgggggtcctgttgggccctgaggaggactgcagaggtgtcggtgaggggtggacaggcaggcgtgtcagcacaaccctgagcccctgagctcaagtgcagggatggccgtgaagcaggtgatggggaccctggcttgagcttcatcggtagcggggctggggtggacaccggggactggcggagaggagatggggtgggggctggtcaaagcagtgtgtccctcagggagcgtggcagagcggggcgcgcacacaggtctgctctccagttcctccgggaagttcctcaaattcagccagctccagctgcccctggcacagaggagctgactgaggctccagtgcagggcctgctccttcccctcctgttcccctcagtgtgccctgggccgggggccaggcatggtgggggtggggaggctggctgtgcctgtgggaagccaccggctcccggggctgtccctgggcccaggctgtagctctgtgcatgcagacgtgcaggctgggtgggcaactggccaccttgcccgtcagtaatgcattcacagtggggggtcagaggaaaccccagggctcctctgcttagcttggccaggggtcccgatggggcagtctctccgtgtgacttaattgtcatcccttttgtgctctatggctattaaataaaacttggcagccaccttggctggaggttttatgtcccagagcccaagggcggttgggagccaggggagcgctcagacggcagggccaggcgagctctgtgtgtgggaggggctgtgggggcctctgagagctgctgcagggacccggcagggcgggggtggaggcggagagtgtgactgtagcttcacagtcatcagagtggacgtggagatgcaggcagagtcctcgaagctggctcaggggtctgtgtggggagggggcacacccagcaggggcctgagggtaagcaagggaggcagcagggtcttggagctgcctcccaaaggtggtggggagccccaggaagagcaaggaacaggagcagccggcaggtgcggctgatccaccctgaggtcccggacacactggtggggacaggaaggctcatcttggagctgctcctggaggggccatgtgggtcacggcccctggccctctgctcagaccacagagcacaggacacttgtccagcctttgctgcgactgtgctgcttgctctgggagcagctgctgctgggcctttggaggaggaggaagggtggcctggctgggacccagcccctgtgcccagcctcttagaaggggaggtgatggtccttttaggccccaggagtgcaggctgcatagtggggcctctgtacacataagctggcaggtctggcttgggctttgctcaggacactgggtactgggttctgggttcagaggcctcatgaaaacacctagcctcagtttcctcatctgtcaggaccagcggctggctgggagggtgtgtgttagcatggcagcggccagcttagtctactctaggagaccttgcctcccagacccctgagctgacctcttctttgagagcttagagaggagaatgacttgttccaggtcttactgcagggtctggggcttcctgtggggactcaggtgcaccttgtccctgaatacccctgccttgcccactaggccctggaactgtgccccggcctcctgtggcactggctagccagatctctgggaaccatcccagcgcaggtggctctgcaggaggccaactcattacccagcaatggccttgcctgatgtgggtaacaagctcattacctggtgatgaccttgtttgtctgttcctggtgtcagcagcctcagctctccctgcaaggaatgtctagcctggggtgggtctgaccagtctgtgccacaggcaccagcatcccagtctgcactgcatggggtgtcgggtctgacagcatctacctatatgtgccctgagggcccagactcagcccccagtgggaagactccgggctcctgatggacccctcccaattgcacaacctgagcaggtaagccctgacccactctgggcctcactctcaccacagctggtgacaaagattctctgcttggtcaagctttatttaggctcctgagccttctcctaggcacatctgagcacttccttataaactctagttttagcaagaatcctgcaaagtcagtttagcgagaagccccccgtccttgacatctgatcgggttccccctctgtcccccaggtgcggtctggccatcctggccggccttcagcaagaattctgttaggggagttaagccagaatccctggctgctgatgcttcctcttagtcactttccatgcgctgccccccaccctgctccttgactgtccgatcgcacttgcccatgctgtcttcgaggctgagcccagtctcttacccactgcagaatctcatcgccatggtcccttatgcctagtgacacggtcctggatagtcttccccctgctccttgacggtccgatcccacttgcccatgctgtcttcgaggctgagcccagtctcttacccactgcagaatctcatcgccgtggtcccttatgcctagtgacacggtcctggacagtcttccctacagcgctttggcaagtgtcatttttcctttttttctttttttttttttttttgagacggagtctcactctgtcaccaggctggaatgcagtggcgccatctcggctcactgcaacctccgactccctggttcaagcgattctcccgtctcagcctcccgagtagctgggattataggcacctaccaccatgcccagctagtgtcaattttcactgaattatttttttaacagtggggactaaagagggtccgcaagcagggctgctgctgggcaccatggagggccgcctggcgggacatgccccaacctacaggggtccttgagggctccccttcccctgccagctgggctggggtctctgtgtcaggagtgtcctcaccaccacctggggatggacctccactgtcatcctagggaaggggccagggaggggagtctacatgctgagcgggcctgtccgaggcctctgctatcccaatgcagcccccagtatttagacctgcccccagtgacctgctccctcttgcccatcattccaggaacttcctgctccacgcctgcgcacatcctgtccctaggccggctccccctgctcagcctcaggacgcagccacccaccctcccaggagcgccttccctgcccctgtggcttcctgctggcactctctgcactgggttcttcctcctggtgtgtggggccctagtctctgtctcctgtcgggtttgacttctaccagagcagggacctccctgagtcctcatggcccagaaaagtgcccagcatgcagtaggcgcatcataaatacctgtctactatcatgtggtgaactgagtgaagacatctcattaaagatgacattaaagaatagggcatagggcttggcattcagtaggcacacagtacatgacggctttttatttccagtctggggttgtgttcatgcttcagtttcccacctggcctgataggaggggctcagctgctgggctggctgtgtctctgtgccccttgcctggaaatgcctgaggaggggcagggtcctcatcccagccacatcccaggggttcccagccctctgaccttgaggagctgtgggaggcaaaggctgcagccaccctgtagcactgcaaacacaggctggggcgggaaggggggtacagagggtgtgcacaaggggcagggggcagggagagggtgtgcacatgggaccagggggagggagggggtgtgcacagagccaggctgtggctgcacctcgacccttaccactcccgcccaccccatggaaccccctctgagcccttacgcctcggcaggtgggggtgaggagcttaagtataggtctctacccaagatttgcaccaagtcatgtcagtcactggtgtacatccttgtaactgacacacacatcaaggtctttcctctacatcttcctgtctcaagatgagaacgcttgatagtggttaattattctcttatgttacgtgtttactggagagtgtgataacacatgaaatagtacgtaacatctacgtcagccaaaagcataaggactgcctgtctacccaaccagcatatttatccccgtatcagcgcaatgcttcactcccttctctccagatgggcctgatttgtatgtttctcttgctttttatagatgtttttctaagtatatggtatcttgaaacagcataatttggctttgattgtctttaagtgttatagataaaaatggtatactgtattttaaaaaaaactcttctagattaatatacttaagtaaaaaatggtattctgtgtactagctgggctcggtggctcacgcctataatcccaacactttgggaggctgaagtgggcagattacttgcggccaggagttggagactagcctggccaacatggtgagaccctgtgtctactaaaaatacaaaaattagccagatgtggtggtgcacacctgtaatcccagctacacaggaggcagggacaggagaatcacttgaacctgggaggcggaggttgcagtgagccaagatcgagccactgcactccagcctgggcgacagagtgagactctgtctcaaaaagaaaaaaaaagtattctgtctatggcttgcatacacacacacacacacacacacacaggcacacacacacaccccttgctgaatttttttttttttttgagacagagtctcgctctgtcgcccaggctggagtgcagtgtctcgatctcggctcactgcaagctctgcctcctgggttgacaccattccctgcctcagcctcctgagtagctgggactacaggcacccgccaccacgcctggctcatttttttttttttttttttttttagtagagacgggatttcaccatgttagccaggatggtctcgatctcctgaccttgtgatctgcctgcctcagcctcccaaagtgctgggattacaggcttgagccaccgcgcccagcctcttgttgaattttttactggatttgcattaaatctgtagaacaatttggggagaatcgacaactttataatactgaatctcccaatccacaaagagtagattatgtattatctctcttatttagattttttaaatgtctttcaatcaagttttataatttttctatacaggtcttgcatagtttttgttagattcttcagttaccttagttcctattgttattgcaaatggtaaatgtaacagcctgggactggccatttaaacccaacattacttctaagcttcatccattctgttgtgcaactgtggctgattcagtctcaccactgtataagaagactccaactaatggccaggagtggtggctcacgcctgtaatcccagcactttgggaggccgaggcgggcggatcacctgaggtccggagtttgagaccagcctgacaaacacggagaaaccccgtctctactaaaaatacaaaattagcca

SEQ ID NO: 97075 - DNA, 14267 bp, Homo sapiens
caaaatatttaagccatctaaaataatcattttgttttgttttgttttgttttgttttgttttgttttgtttttgagacggagtctcactctgtcatccagtttggagtggcgcaatctcggctcactgcaagctccacctcctgggttcacgccattctcctgcctcagcctcctgagtagctgggactacaggcgcccgccaccacgcccagctaattttttgtatttttagtacagacggggtttcagcgtgttaaccaggatggtcttgatctcctgacctcgtgatccacccacgttggcctcccaaagtgctgggattataggcatgacccaccacgccaggcccaataatgattgtttttatagacaatgaattcccacattcttgcctttctcaccctctccatattttttttacttttaatttttgtgggtacatagtaaatatacatacatatggggcacatgggatatcttgatagaggtatataatttataatcattacatcagggtaaatggggtatctgtcacctcaaccatttattctttgtgttacgaacaatccaattatactgttttcgttatttttaaatgtacaattaaattattattgactataatcactgctgtactatcaaatactagatcttattcattctacctattttttgtactcatcaaccatccccacttcaccctctccatttattacaacctttcccaaatacacactagttaatctgcattcaaaagttataatcctcaaaaatgcacttcccaattcctgactataccattgttagccaggttgccttgggtgagtttcccaacttccccagccctcacttccgtcatctacagaatgcagatgaccaagctcctaagagagttgtcgagagactgcactggctgtaccaagcctagagagcactaaataaatgtcaattattatttttatccattctggcatttagaaataaaagttacaaaattcactattaaaaataccattgatacataccatattccagccacactggcctcttttctgtgacaaaatgcccttttcttcttttgccctcaacacctgctcctccctatgcttggaattttcccccagctcctccacggccaactcattttgttccttaaatctcaagtccaatacctctcaattcaaatattccccctttagagagccttcattgagactgctatccccaaaagtctaactttcttataatcttgctttaattctgtcatagcttttacaaacatctgtaattgtcttatatacactggtatggagagctgatcttttttgcactggtatttgcagctcctagcattgtattacagcaaataatgtctgcttaataaataaataaaaaatgatgcaatgtcaaatactttaaaacaacattgtgctcacacaattttaaaaacaatttgagtttaacatatgtcacaatgtttgaaaaagagtttagatgcagcagtgtccaatcttttggcttccctggagtacactagaagaattgtcttggggcacacataaaacacactaacactaacaatagccaatgagcttaaaaaaaaattgcaaaaaaatcttataatgttttaagaaagtttacaaatttgtgttggaccatattcaaagccatcctgggttgcatgcagcctgtgggccatgggtcggacaagcttggtttagggagagggaggatatagagaagtattacacaacggtttttccttgctgcctgtttaatcgccaagagcaattcaaataacagaatttatacaaatgaggatgtataattaaggtcattcaaaagttttgggaatattgggccaggtgcagtggctcacacctgtaatcccagcactttgggagccaagacgggtggatcacctgaggtcaggagtttcagactagcctggccaacatggtgaaaccccatctctactaaaaatacaaaaattagcccgacgtggtggtgggcacctgtaatcccagctactcaggaggttgaggcaggagaatcgcttgtacctagaaggcagaggttgcagtgagccaagatcatgccgttgcattccagcctgggcgacaagagtgaaactacgtccccccccaaaaaaaagttttaggaatattaactctacttttttataagtggagtaatcattcccaagacctcagcaataaaaaggtgactagagtgtagctaactccactttctggagtaagctgaaattcaggacttatcactgtataaaataacagtttttccattcgtttaattactctccaccacagacctacacagatcaattttcaccatggctggaattaccactacttagaaatcatgtatgtggctttcacacatgactaataaaacactaagtttcaaaagcattccatgagtactcatgagaaacattttaaagtttgtgtttttgtccctaatacaaaactagttgatgttatttctactaatataattattatgttacaggtagtaggattagagaattattttacttgacaaacatacatcatgcatattaagtgcaaggcactttacatattgattcacttaagtctcatttaagataaccataggtactttcattatatagctaaagaatacaggcacaaagagaaaactttcccaaggtcacagagttcaatggaggagctaaaatttgaatccacagtccatcactagactatgctgcctaacattttaaagaaaatacatagactagtttttcatagcttataaggaacaagtcattcccaattttataatttttgtttgtttaaaaaaatagaaatggggtctcacgatgttgcccaggctggtcttgaactctggggctcaagagatcctcccacctcagtcccccaaagtgctgggattacaggcatgagccaccatgcctggcccccaattttagactagtttcagttgagtaaaaaggcaacctacctaaaccatttgcacattaaacctaaacagcaagaagactgaagggaagatgagcagaaggaagggaagtacagtggggaggaaggaatgacaatgaaaaagaaggtaaaaggagaaagaaggatagaaagatgagaatgctacctgtaaccactattcataatctctggatggcaaatgcttttttttttgaaaagaagagacaagacagtatctctataatccttaattagctgattgtacagactgtatgtttccatttcaaatgttgaattaaggcacctaaattaggaggaagtagacaacattccaaatttctttccataaaaactgaaattacatgttaatcagttcactcaaaatctgggagtttagtgacttttgctgccaacttctttttttaaaaaaaaaaataggcaaacattgacaattttaaccttaaatttcttaaccaaaagaatcagaataattccccaaactgagtaacacattggaaagtttggtagagctcagccaaaaatgactaaatgagaaagagattaacaaagatccatagcacattcttgagtttccaaaggatgtaattcaaagagaatataaaggaagaatttacatttcataaaatctataaggggaacgttttctgaacatttctatattttattccaagtaaggtaaatttaagctaaaactcagctgaataaaaccaactagagccaaatagcagcaatttcctccaagcctctgcttttgttccaaactacccatttaaagaaagaaaaagccttgcaataggattctagactgacccaagaatatgccagtttgacaaatttttgttcgttttttgagattccttccctctctctgtgactagaatagagaaaaacaacaacaacaacaacaaacagaaaaacaagtaaactttcatcagaagcaaaataagtttcctaatagaagttaaatagaagaggccaggcacggtggctcacgcctgtaatcccagcactttgggaggccgaggtgggcggatcacgaggtcaggagatcgagaccatcctggctaacacggtgaaaccctgtctctactaaaaatacaaaaaattagctgggcgtggtggcgcacatatgtagtcccagctacttgggaggctgaggcaggagaatggcgtgaacctgggaggcggagcttgcagtgagccaagatcgggccactgtactccagcctgggcgacagagcgagattccatctcaaaaaaaaaaaaaaaaaaaaaaagttaaatagaagaaacagcaagtggtcaggataggcaccgtgtcctatttgtttacttatttttatcttcagtgtctaacacactgcccagcacctatgatacagttaacaaatgtgtactgaatatgagtgaatgaacaaataaatgttacgagaaaagggaaggcacaaaatgctggaaactatttagcaagtgagaatcttcccaaaatacttgttttttccccctttgaggaagggacccagattgaggcttaacaaagggaccgctccttaggagtatccttaaggggtaaaatgatgtcagcattatggtaataagaaatggcatcagtatttgagataattactgggttaaaacaagcaacagggaccccacaaccatctagcattggttgcaaatgtttttgcagccagattttactctatacccattgactttgatttggcataatgatgataccacatttggagcatgctgagggaaccataaccccctccctcccaagaaagccaagatggcagcccatgggctcctgtttgcatttgccattaaggacactgtaattggtgtttaatgcagaaacggaagctacctcaaatctgttttagacatagatgggtattatcagtagggtcctgccaagaaaagcagcatactcaaatgaagtattcaagaaaacttaatgaaggaaccatttcaaaaggtacaggcagggtttagggaaaacagcaaaagatggtggtataactccaggttagcaacgtcaggaagccattatcatctccaggtctaaaggggctagggaagggttattagaacccagaaagatgtgtaactatagatggctggcagagagggccattattgaatacaagttgtgaactactcacagaacagctttggcaacactaaatccagcaagagggaactagcttttagggagatcctttctgatgtccctcccactgggcaaagctaatctgaaaccaaaaaggaagggctcagttgatgtaccccatgtaattcatttcccagaagcacagagcagagtggagaaaagatctggaagggcaaatggaacacacacagcacagaaagatattctaaatgattgtcaaaaacagcaaaacacaggtataaggaatcaaagttttgtcagttccagctaaatcttctagatattgtgggactgcccgcaaataagtcataaacattggtacttacttgggttcctactgccctatatcaagttggaaaagaaaaaaaaaagcagcagcagctacgagtaattccaggtaacttctgacctttctgcgtctctaagagtaaacagacaaatcatttatctacaatggagcagatctaagacaaggctctcgtctttgctcaaagggaacatattccaaacctccattatcgtacttatcatgatgtattataaccacttgtttatttcttcatcattagactctgagcccttcagggcagggattatcttattcatctttgtatccctagtacctaacatggtactggccacgaagctagccttccatcaatatgcattgaataaattaatggactcagtgtccattaatcggcagcctaatgccatagtggctaaaatctgaaatgacccttagcaattaaacactaataagttgtattcaggatatggtttaatacactgggctaaaacatcgcgccttttccaaaattaacatttttattaaaccaagtttaaaaaatgttcagtgtagaacaaaaccaaaatatacctttttatacaatatatgtatatattagcagcaaactactgagattctcttttatgttcttttagttattttaaagaaagcataaacaatgtatattagtatggaatgtcagtgaatccactcttagtcctttattctgtgatttgggccttctacaaaatactttatgattctcactaatgaatactaagaacatacccaattttgactaaaaagtagtgaaacagtggttggtagaatctttctcactgtatcacggtcacacattatatctgagaataagaaatgagcaccatacaaacaggtaattgtgtgtgtgtgtaaactcaatttctaaggtgtaatagcagccaactagatcacttagcactgtgactatcactttttaaaaatctggttatacacaaaattttaacaaatcagataaacacttcaaccccctattgcttgtccatttaaaaaatccttatagaaactctatatataacctgaaaaactgcatacacacatacgtgtatatatacacacaaaagtatatatatatacatatacatctttagctttgaataaatttctaaactgagatgaagccaaacctctcatttayatcttctagaatacagtaataccaactgaaagtttctaataagagtttcaacttagttaatcagaaatactggctactgaaaattctgaggccaaagagctgctattcagcttagtatattctaggcttacaaatcagtcaaagactgaaattaccaaatgcccatgaaagaaataaatttttctctctgtatttccttctaataacaaaaagaaaatatctttacaacaagctttcactttttaaagaattaaaattattactagtcttcaaaaatagtaaatgttatataaatacgattttcttatagttgaatttttcagctagaatctgcatttaaaaaatttcctttggatttttccatttagcacttcaagtttctattctgcaactctaataactggctcagatttgttagattathtcacatcgttcaaaatttgctactgtgtgtttaatgtgtacaataataaagtaaatgggaggaatgtaccaaatttcaaaagcaacataatgaaaaattcaagaatatttaatattacaaaaagataaagtacaacagggattctctttcaccattacattagtgaaacatcttttacgcttttaaagctaatgtcataactttcattttttaacttaccaagaggatgaagtttttagaagccctacctttattttcaatcaaaaactaaaatgactgaattacttttattaatatacacatcaagttactgaaacggtgacttcatgtagtttcccccttaaagatggcacttgcaggtacaaagatgcagagatgtctacagccttcagatgtttacttgaaatgattcttcaacagcagtttgryattgrgtttcttcatctagctgaagattcacaaattctccataatcaaaytgatgtctctgatttagatgactaacgaaatttctggtaatctggctaggatctccccaaggaagagayacacaaataggacatgtcacaggaactatctgaaataagtgattactgttagagtgatccagtaaacgctctctggtaaaatttgattcttgacacaggggacacttataagtaggatgaccagaagaacttgtattctcttggtaagtttctgtgttatcagatgtggatgtttcactcctattgctgttccctactgaatcttcagagatctgaaagtttggaatgatagaagaaacatcatattcatcctgatacttcttasaagatttgcaatgaagtctcatgmgatagaatttaatctgttttgcacagcatctgcagctaccagaaaacttcctcattatattttcaaggtctaaggcccgttcagggcatgctctctcttctagtcacatttccacgacacaggggacaatgtgctccgctttccctcattgcagtcaggaaacattttctacagaaaacgtgctgacagggcgcggtccgcacgggcgttttgagcacctcctgacagacggggcagtaggatgtggccgcggagaggtcctcagccatggcgggggatgggggaacaaggcgatggtgacagcggcagcggccccgatggtgacatggtgacagcggcagcggccgaggtgacggtgacggcccggggctcgatgccctacaacaacatcgcgcctttcataccagcctaccaccattctctgtagagcttttctcatgcgctcagataatgtatatggcctgttctatagtcacagaaccagtcataaaaagagccaaagacagatggcaagactatgttccatttcagaaaggaatcaaatatacattatctctcaaaattctcattctttttccaagaatttaccatatccacttgaggaactaacacacaggacttctcaaaattctccttctttttccaaggatttatcagatccacttaaggaactaataattcaaacgtgtatatagaggaagtcgtgtttcacactgatgataaagatgacatacggacagaaacatatacacacacatgcacacaggcatgtttaatgatcacttcaacacacatcacccacagtaaaattataaagtagttgtacaacaggttgacgtaacatcatcatattaaaatggctatactgtatgatgttgaggtggtcattaacagaatctggaatgtatccacattataattatgaaccactttcacaaaaccctgcacttatgaagtgcttaatcatctttttgttctaacagtcaattcttacctgtggattcctcacagaaaaaggaaatttatgccaggttgaaaactctcttgaagctaccatgattttaggctaccaatctcctgctgtcagtaaaatgaatacaaatcaaatttaatataacagactccaccagaaaggcgcatttgctatataacacgtgtcttccaaaagtaagcgtgaaaagttttgtatctcctgcaccactggtctccttcactgctgtttgcaatggacagttgatgttgttaaatgtaatgtaatcttacatttttaaaagtcagtaaaataggtcactttctatttaggaaaagggaattctgagcttatagtgataatatgctgaattactttaaaagaaatgccagtaataccaaaacataatgttgtaaatagattaaatgccttttcctaaaacaagtcctcaaagctttctccaaaaccaccaaaaacacaattttatcttattgacagctattgtactcctgcaactgtcaggtcaatgtagcaatgaaattaacctttataggataattatgtgatgtttgtatcatgttaaaactacaggctacaacaacccataatttataaaattgtactgcatgtcagttcctccattatatgtgattttttttttaattgcagatctaccatatggctttgtgtttaataccattagcttcagctacctcagagcagtattatgtttcagccattctaatcactgtttggcccatagaaaaaaatttatgttgttttacaaattgatcgaactcccacagtaggaaaagacaaagatgatatgtaattctgatagtgcacaatatgtggcaatgataggataatattcaatatattagaaatatatttttttctgatcgaacattttcctctcctttcactaaaatataaacaaagtttaacaaagttccaatgacatcaagtataagttaaaatatattttttaatgtaacatttctatgaaaggtaattttttgttgcaaataaatttgaatatatttaattattaataagtcccgacatctgaaaggactgtgtttttataaagacagtgttcagttgggcgcggtggttgacgcctgtaatcccagcactttgggaggccaaggcgggtggatcacaaggtcaagagttcaaggccagcctggccaagacggtgaaaccccgtctctactaaaaatacgaaagttagccgggcatggtggtatgtgcttgtaatcccagctactcaggaggctgaggcagagaactgcttgaacccgggaagcggaggttgcagtgagccaagatcgcgccactgcactccagcctgggcgacagagcaagaccgtctccaaaaaaaaaaaaaaaaagacaatgtgccaaaattgtgttccactttcctaaacttaattcctaaaactcactgtggacctaaacaggaagtgtcttgggaaacaacaaagatgcttcatattaacaggtaacaaaatgcagttttagggcccagcgctgtggctcacacctgtaatcccaacactttgggaggctgagacaggcggatcacctgaggtcaggagttcgagaccagcctggccaacatggagaaaccctgtctctactaaaaacagaaaaattagccaggcatggtggcggtgcctgtaatcccagctactagagaggccaagacaggataatcacttggacccaggcggcagaggctgcagtgagccgagatcccgccactgcactccagcctgggtgacagagagagactgtatccaaaaaaaaaaaaaaaagataacaaaatggaatttttccttacaacaacaacaaaacctggtaacagaatttataagaattccacaagattgcaagggcctaaatgacccggttggaaactggagagtggaataactaggaactactggattaaaaccgagggaatctcctgtcactgagaaaccattatgcagacttccatccaggtggctaaagccacagatctcccaccctgagaacttgccaatactactactattctgattacttcaacatgagtaggactatccaaacctccagcagctcttgctttgtttttgtttattccatcatatataaatagttcacagcataactgccttatacaatacataaaaagtgaaaactactccttccaacgcccatcccttatccaaatgattccagttctttctcttcaaaagaaaggagtaactggcaaccagaagcctcataactgaactcttccaatcaggaagacaatgcgaaatctgctgcagccaaagaatgtctactgctccttgagacactgtcacaagagatggaaagctacaccatggcaaggtctgggcagacaaggaaacaggtctggggtaccgcatcctcccccacccccaaaacttctttagacctatacgcaaaaacttggcgtgctcatccctacttgcaacctgacaatttacaacctggcacaccttctaattaggaactagttctagccttttatagccgaaatattaaactgcttctcacgataaatcaggcactggcgcctgctactgagaatcccctgtgcatcaaacctccagtttcactactgagatgggccagtgaccaggctcctctaccgtacagaggggaggagcccaccctgctctgctagagtggaactgcaaacagaggacaggagcaaggcatggagcgcagaggcgtgaacagcgtccaagcagggctgggctcatcgcaccggcgggcgacagacagcggcgggcacgcgggagccggggtgcaggctgcaaagcggggtccctcggctgcagaagccgcccccgtgtgtcgccccacagcggcgcacgcgtcaggcaacacacccccgctgcccgtcgcggctctgcgctaaagccctcccgggacagccgcacacgcccctcggacccggcggcgcgtacgtacccagcaacacgcagagcacatcgagggccacgtacggcagccgcgtcttgtcaaacatggtctctgcccgggctgcccggcaagggcgatggactgagctgcgggacggcggccgaggcccttgattctcgagcccgggccggggctggcgacggccccgagctacggcccctcccagccggaggaggagagcagccgagggcgggctgagaccgggcggcgctcccaccgccagcaatggcgcccggggccctcccctcacagcccccgcgaacactcggttagtgccgaggcgctcgtgtgccagccgcggcagctctgtagcctcaggacctcctcagccggcacggcctgccccggttgctccccgtccggatcccggcgctctctcccacaggcggggcgtccagactctcgctttaaggatggggaccggcagggaggaggaacgcggggtccagcccctcccgctgagcagcgcaggaccgggcagcgcgcgggttcgcgggcggggggagtgcagcaggggcggggccagggaaaccccaggccgcggcggtcagccaatcagcgccgtcggcctcatccctcccgacctgcggcatccgcccagaagtgcggctctcggcagccgggcggggcgtgggggcggctcccgttccgatccagggggctttgctctggaccgcaattgctcaggtggtctccgaactcggcctcggtacccccactaggcattgctgctttcagagagctaggctccctacccaacgatcctagagcaccggctgcctgccactccccaccccttccatggggatgaggtaataaacaggtcagattgttaccactgagtttaaggggggaaaagaggtcagagtaggcaggaacagagacgctctcctttagtttggtacctctgagccctttctcacttaggcctcaacgttgacctccctgtgtcctggctgagcccaaatgttagcaagaagcatgctaaatcatccatcctcgatacctgatcaccgttgaattcttgatatttaatatcggattagattccttatattacacctttgttgtagaagcccttgacctgcctttagccagaatccctctacccttgatgtctcctcttagtaattttccatccaccgtcacctccctcacagacacggtgcctgttccttggctataaatcccctgctgtctttgctgtattctgagttgagctcaatttctctctcctgttccaatagtcatgacccttattgtaataatcttgaataaattattcatgtgtttgacaagtgtcaggataattttctttaacagcagcaagcactccccctgccccatacccaggaggaccctagcccacatttagtaatctcagtttcctaatatgtaaaatggggattttttaaataaatacctaatactcagacatcacaagtactttgaatttattgtgaccttgcaatctgaggcccttgtaactctggaagtaaagaaagccacatgataaacaatggcccatctttctcaggtgtaaattgcttaaagcttttacagctttaagctgcccagtgttccagtctggaggaagaagtgaaacccagaaaagattatatgatagtggctttatctagagttaaaccgtctacagatgttaatgattggtatattttctctttaaatatgtaaaacacaaatcacaaaatgtgcctactacttcttcgacttatcctgcaaagcactcataaagccaatggaaagataacattaaacagagtctggagatacagccccaagtaagctctcaaaaacaaaatatacatttgaagaaagatgtttttctttaaaacgaatgctaatgttttattttgcctcttgtttaaatagccgtaaaagctttaagcaatttacacctgagaaagatgtgccattgtttatcatgtagctttctttacttccagagttacaagggcctcagattgcaaggtcacaataaattcaaagtacttgtgatgtctgagtattaggtatttattcaaaaaacatttgttgagcacctattgtgttacagtctagtctcagtgtcttaaacagcttttgaaatatttactttttaaaagtaatttttaaaaacatttactttttaaaaattttttatttttactttttgtgggtacataataggtgtatatattttggggtaatgagatgttttgatacacgtatgcaatgtgtaataattacatcatggaaaatgaggtatccatcctctcaagcatttatcctttgtattacaaacaattcaattatactcttttagttattttaaaatgtacaatttaatt

SEQ ID NO: 97076 - DNA, 83232 bp, Homo sapiens
cgacagagtgagactctgtctcaaaaataaataaataaataaaaagaaaggagctattatgccacaaaaaaacatggaggaaacttaagtgcatattactaagtgaaagaagccagtctgaaaagatcacatactatatgacagcaactacatgacattctggaaaaggcaaaactacagagacagtaaaaagatcagtggttgctaggggtttggtagcaggaagggaggaagtgaggacacattaatgcaagatattaacaatgggagaaactgcattgggggagcaggaatatctgagtagtttccattcaatttttctgtaaacctaaaattgctctaaaaaataaagtctattaatttttaaaagtcaatcagtataaattcaccacatgatcattccaacagaaccaaaaaaaaaaaaaaaacccagcaagcaagcatgtgacaaaattgacaaaattcaacatcgattcataagagaaagtgctcagcaaacgaggtacagacagggaactttgttaatttaataaaaggtatctaaaaaattatagctaacaccacacttaacaatgaaagagtagtggccaggcgtggtggctcatgcctgtaatcccagcactttaggaggccaaggtgggcagatcatctgaggtcaggagttcgagaccagcctgtccaacatggcgaaccccatctctcctaaaaataaaaaattagccaggcatagtggcacatgcctgtaatcccagatactcaggaggctgaggcagaaaaatcgcttgaaaccaggaggtggaggttgcaatgagccaagatcacgctattgcactccagcctgggcaacgagagcgaaattccacctttggggaaaaaaaaaatgaaagattaaatgtttttcttctaagatatggaacaagaaaaagatacctatgctcaccactcttattcaacattatactggaggctcatctagtgcagccaggcaagagaaggaaatagaatgcaaataagttagaaaggataaaaacaaaactgtctctatccacagttgatataattacctacagagaatgtccaaaggatctgcaaaaggcttcattcaagaactagtaggtgagtaaaacaggttgcaagatacatgctcaacatggaaaaatctattgtacttcaatataatagtaacaaagaattagaaattacgttttttaaagcatcatttataataacaatacaatataatatactttataataaatttaacaaaacatatcatgatctctatgctgaaaactacaaatcagtgataaatttttaaaaatgaccaagtaaaaggtctctgtgaattaagtcaaactgattttgacattaaatcccattctcttaaatgctacgttatccaatttgtctctcttgagtagcaaaaatactttgtgaggctaagtaggtactgttatttccgttttacagagtaagctggagctgctatggccaagcactcacactcttaggtatgtactcatggaaaatgaaaacttatgttcacacgaaacccatatgtgaatgtttcttgcagctgtattcataatcaccaaaaactgcaagtaactaaactcaaatgccctttaatgagtaaatgaacaaactggtacatccattaacatggaatactaatcagcagtaaaaaggagcaaactactgatatacgtaatgaatctcaaaggcattatgctgaatagaagaagccaggttcaaaaggttacatatggtataagtatacatgtgggacagtctcaaatggaaaaaagtataatggcagagaacaaatcagtggttgctgaggttagggatgaggagagattgtaactacaaaaaggtagcatgagggagttattcagggtgacggaactgttctgtatcctgattttggtgttggttacatgaatcacatgtgttcaaatttatagaactatacaccaattttaaaagttaattttactgtattttaaaaatagaatctaaaaaaaccaactaatagcaaacagaaaactaaagaaaaaaaatgagataccacaacacacctactagaagagctaaaattaaaaagactgaccataccaagtgttgataaggatataggacaactggaaatctcatacactcctggtgggaaggtaaaacggtaccaccacttaggcagtttcttaagaagttaaacatacacctaacaagttgactcagccattccatttctaaatattacatcaagagaaataaaaacataagtccatacaaagacttacacatgaatgttcataatttatttgtaataacccctaactagaaacaacccaaatatctatgaacaggtgaatggataaacaaattatggtatatacatacaatggaatattactcagcattaaaaagaaataaactactgataaacacaaaaacatggatgaatctcaaaataattatgctgagtgaagaacctaaaaaacaaaaaaaaaaaaaagcagaatatgtgctgtatgcttccacttaaataaaattctagccaggcgcactgtctcacatctgtaatcccagcactttgggaggccgaggcaggcagatcacaaagccaggagttcaagaccagcctaaccaacatggtgaaaccccgtctctactaaagatacaaaaagttaactgggcagggtggcacacatctcagttacttgggaggctgacgcaggagaatcacttgaacctgggaggcagaggttgcagtaagccgagatagcgccactgcactccagcctgggcgacagggcgagactccatctcaaaataaacaaataaaaataactaaataaaaattataaaaaatacaaactaatgtatagtgtcagaaatcagatgagtgcctatccatggaagcagaagcataaggcaagactagaaaggagcacaacaaattgttgtggatattgaatatgttaattttcttgactgtgttgatggtttcacagatatatacatatgtcaaaacttaccaaattatacattttaagcatgggcaattttttttgtcaattatacttcaataaaactctcaaaatgcaattacaattatgtaagaaaatatacaaattagtgagaatatgtaaaaataaaatattcatgttattgtagaatagacatgactgttaatttgaaactttaatggtattgtatctctatataaatgaatgatacaaaaactggtataaatatatttgtttgttgttttttgggcttgtttttttttttttttttgaggtggagtctcactctgtcacccaggctggagtgcagtggtgtgatctcggctcactgcaacatccgcctcccaggttcaagtgattttcctgccttagcctcccgactagctgggattacaggcgcgtgccaccatgcccagctaatttttgtatttttagtagagatggggtttcaccatgttggccaggctggtctggaactcctgatctcaggtgatccacccacctcggcctcccaaagtggtgggattacaggcatgagccaccggacccagccataaatggattttttaatgggcaaaaggtttgaacaatacttcaccgaagatctgtagatagtaaataagcacatgaaaagactgtcaacatcctcaggcattaggaaaatgaaacttaaaatcacaatgagataccactatatacctatcaaaatggctaaaataaaaataaaaacacacccaaaaatcagataatactaagtgctggtgagggtgtggaaacaactagaattttaatgcattgctggcaggaatacaaaatggtacagccactttgaaaaacagtttggtagtttctcataaagttaaacacacattgatcacacaacttagtaatcccactactagatatttacccaagagatatgaaaacttacgttcacacaaatcctgtatgggaatgtttgtagagcttttgtcacaatcacagaaactggaaacatcctaatgtccttcagcttgtgaacagataaactggcaaacccatacaatggaatactactgagcaataaaaaggaacaactactgacacatggatgaatctcagctacattatgctatgtgaagcaagccagactcaaaagtctaaatcctgtataattccatttatatgatattctagaaaagacaaaactataggcccataaaacacatcagtagttgccaaagggtgtgggaatgaactactaaggagttggaggaaattctgatggtgatggaattattctattacttgaatccagtgaggttactctactcatttgtcaaaaacaataaaactgtacaccataaagggtgaatgttactgtatgtaaattatatttcaatttaaaaaaactcagtctgacagtttgcatatttttaattttactgacaacttatggaaaagaaacatctctctgcttgcaacctgtcaagaaatacttaacaccatgctatgttctttgcaggcttttttctttttttgtgagacatattccctgcctgacagaggagctcattagggaaacaagtctaaatattaaaataagttacagaaaaaggccaggcaaaaataaattaattgagtgataaatcacagaatacattttatatgtgtgggaaatgaatggcacataatcttggaaaggtcttagtgcttctcaacattgctgatcttatattatctctaactttcaagtgaggatgatgagacttggagaggacaagtactttttccgtgattcccgagctatcaggtgtcaaagctgagattctaacccacgcctcttcgcccaaaacctgacattttctgcatgcggcgatggaacaacacagaagaggttacgacggcggctacacagtgtgatttcaatggacagcaccgcctccttactccccaaacaacccgctcaactacttggcacgaatcctacacagtaacaccatgattattgccacgtttcttaaattgagctcaacggggtcttggaatgtcaactcccgagaaaggaatcagcgagccttgtggggatatggacctacttctgacaagtcttggtagtaaggaaggcgcatggggccagcgccggagccagggtgccaccgaaaagggtaaacaccaagaaagaagacagccgaggcgctgaagatactcctcttcaattacaccactcagctctgggtcacaaggcggggaacagcgtacgaaaaacccctcccctggcccttctagcccctttggtgaaagatttccgtggacttttccctgcctccgtcgccagtccagggctaaaactgaggctcctctacaggcgtggctgggaggaaagtggtggtgcgccttaacagcgcaagcagcccggggcacgccgggggaaggcgctgggtagtagggaccgcggacgcacgaggccgggccaaggcgcccagagccgggccgggtagggctccgatgccagagtgaaggggtcgacaggggagaacgaactcgggaaattctctccggtgacaccctaagtgtcgcatgatgcgttagttgactaggggctctcacttttccttcctttactgacctcgcaatcactgaccacgcaatcgctgcccacgccgccacctcacctctccagttcttgtactgcgggatgtagtagtatttgttcccgaattggtccgtgcccacgtgctctttcacttcccttgacagcgatctccacaaggcgcggaacaaatcctgagaccaacccatgccgtccacccagtttccagcgctgccagcagcgggacccgcagtaggggtaatgctccagccgccgacccagcccaccgaggcggagaagtcaggccggcctccatcctggagcccttctagtaacggcgctcaccattggccggatatatcaccgactgaccaatgggagactctgctgttccagtcccgcccctgagctctgtcatggcgacgtccagtgckccagccggtgtgaggacacgatatgctggggtttttgtccgcacgccaaacgggtttggaggaccctcttcgccttcggagagcagagtcaacacggaggtaaagaaaaccttactttttggctaacaggccagttagaatctggaccaatgactgtaagctttgccccacactttcccgtctcatcgctctcctgccaccaaactattatttgccctctaatgctgtgtggcttgctaaaataggatcccttttatttactggtaacaacttgcaggcggggggcggcgggggtgggggggggttccccgggggtggggggggttcccccgcgggctcaggtgaagacactataaacctaaataagaatacttcgttgtactgtattccttctctcttaagttactccaaagaataactgccctccacggactcgttcattcattcagtctgcatatttagtgaattcctacagtgtgccaggcagcctattaaaggcagaggacacaggccaggaattgaacaaagttcagaatgactagagcggagaattggggtagggaccattgacaagagatgaagtagacagaaactagatgaggaagagccttgtgtacttgagtagaggtgtgaagatgagaataaggtaacagctattgcattttgttttctgcttggagaatgggttgcaactgagaacaagagtgggagccaagttaggtaactgttgtgattacacttgtccgggagagagttgttggaagcctgggccacagagttgccaagtagaataaagatagtggagagatttgaacaacgtctgagaaatagaatcaacaggccatggaaattgagtggatacgtgaatgacaaaaagagaagaatgaataatgattcccagatctatgccttgtataagaagttgaatgttggtaatatactctgagagagggttttccaaagggaagaagcaagttgtacttttaattttgcccacattaattgaggaacctgtgaagatatttacttggagaacacagttgcttatgagttctgcgttctggagaaatttaaatattagtttccaacattttatccattacgttttcaatgttgtgaaatatctctgagagttcctttaatgtgttttttttgccastgtcacttcctctgacacatcatcagcctttcatcacaatcacttttcctcatttatgtctataagttcaccttcactgatttcctcagtctgcatatctagaatgtctcaaatggcggcagtgtcattgttgccacaatcagcatgttcccacaggcagcttttttttcatttgctccatttatgtttaatgcaagtttcacttctagtattatcactcttctttagtgcactttcattcttttggccaatttyctcttttaatctgtaaaattccatgtgggtttatctcaagggcacagaaatattaataacaaacctccatgctttgcagcctgtgtgtgaactgaataacagatgcacagtgaccaatcacccatagactttgaaagaagtaaaattgcaaattggtcaattttgattcatatgttatttatgtaatgatttgtgaactgaaaagctagtagcaaacttttatgctatttctcacggttaataaactgtggtaactgaaattcatatcagactgtgccaagtgaggattgcttatacgtttaagacaaataaagtatttaaaaattaaaaaaatattttttttttgaggcagggtcttgctctgtcacccaggctggaatgcagtggtgcagttacagctcactgcagcctcgactttccaggctcaaatgatcctcccatctcatcctcctaagtagctgggaccacagacatgtgcccacacacctagctaatttttaaatttttcgtagagatggggtctccctatgtttcccattctggtcttgaactcctgggctgaagtgatcctcctgcctttgcctcctaaagtgccgggattatatgtgcgagctaccacacagcctaaaatttttttaaaaatatttccatcattaagtgatgtttttgcttaaacaattatatagttccattttattcataggagatgtctactgttcttccttgtcatcatgtaagagcaaaagsatgaacactgatatgcagtgttcacagtttacaccctctaaaaaaacattttacaactttattgaggtataattgacatgcaataccctgcacattaaatgagaayatacaatttgatgaattttgacatatatttacttttgaaaccattaccataatcaagagaacatccataaccctaaaaaatttttgacggtcatttataatccctgtctcccttctttctctgctttaccctcttccttctctagaaactactaatctgctttaggtcactatagattagtttgcatatctagtattttatataaatggaatcttttttgtctggcttctttcactcagcataattacattattttgaaatttctccatgttattgcatgtatcaattccttttttttgctgtggagtatcccactgtgcagatataccacagtttawctagtcacttgtcgatggacatctgagttgtttccagttcaggactaatacatttacagctgctctgaaaattcatgtatgagtcattgtatgaacatatgcttttatttctctgaagttaatgcataacagtggagctactagataaatcctttactttttaagaaactgacagttttccaaaagcattttccagtcccaccactaataggtgagagtgctagctgctccatatttatgtttcccctttcctgctttcatttgactrtttgaacattatttagtattctattttatatactatggttttgactatatctttttgtataattctttagtggctgctctaggaattataaaatacttacttttcgttgtctacttcggatcatttcattgttttactgcttcatttggcatatagaaaccttatcaccctttcccctgcaccatatatatattgttgtcttatattttatayttacatacattatatactctatcagacattataattttttccaaccatcaatcatattttaaggaaaaaagtagccattatatttaaccagatagttatttctgttgctgtctctttattcctgatgcctcaaatttccttcttatatctttttcttgtctctgaagaatatagtttatcaatttttttagagtaggtctaatggtttctgaaaaggaatctgcagccattcaaatcattgttttcctataggtaatttatcatttttctctggttgctttgaagacttcgtctttagttttcagcagtttaattatgatgtgtctggttgcagatctctttggatttatcctagttagggttcattctgcttcttgaacttgtagacttatatctttccataaacttgggaactttccagccattttttccaatgttttttcaacactacactctttctcttctccttctagacctccaatgacaaaaatgttagtccttttataattgttcctctgatccctaaggctttgttctttttcccttcgatcttttttcctctatattgttagattgtataattttaatggatctatcttcaagttcacagattttttcctctgccatctccaatctgttagtgaatacattaagttaaaataattttatattgaaaactaaaatttccatttggcttttatttatgtcttctatttctttgctgagactttctgttttaacatctgtttcaagtgtgtgcacaatggcttactcaagctttttttttatttttagagatgaggcctcactgttttgcccaggctggtcctgaactcctaggctgaagcagtccccctgcctcagcttcacaagagtcactgggattacaggctcgggccaccatgccagtgttgctcaagttcaagcattttacaatggttgccttgaagtctttatcagataatctcaacacttgtgtcatctcagctttggcttgttttgtttgtcttttcccatgcaagttgaaattttcayggttctttatatgcagggaaattttggatttgcatcctggacattttgaatactctgggtcttgttttgatcctatgaagaatgttgatatttttgttttaacatttaattagcaagattaggttcaggctacaagaacctacctacttatggactgtagttttaatgttagctcagttttcaaagtctcttcagatcttccccaggtgtatgccattcaatggtcagactgtgacctgagtgattagctcaattttcaaaatcctttgtatacgactcagggttagatctatgcatgcctcactcagggatgagttctggagtttataaacaactttatgggatcactttcctgagctccttcttctctgtgatctcctggatgcttcccagttctctgggactccctgttttggccatctagccagaaactttagggttcagttaccctgttctgccatacgcttccaagtttaggcccaagtctgggctcagaagtgagaagagaggcaataaacaacagggattgyccctaccctcttgggatcgggactctgatgaacagagaaaacaatttcccttcctcagagttctggcttctgcaggccactatgcgtagccatagccatttctgtcatgggattgtctgtggctgtttacttttcagagtcctcaagtagctgtctctgcattttgtttagtttttatagtagtattacccagaactgaagtattgaataatgaatgaaattatcaaattaaatatcacaactcataaaacaagaattaaaagaccagtaatgaaaatgataagagattaggagggtagattcaaaagatctagcagacaataatagttccagagggagaacaaaacaaatagtaataaagaaaaagaattgcaaaagatctggattcatagactcaaagggctcactgaagtccagacaagattgataaaaaagacataaaagtatgtatacctagtaaatttatctagcaatgaagaaaatattattaaaagcttctaatggtaaagaatttaccattcataaaggtaaaacatctcatcagtagttctagagactagaaaacactggaatgatacctactaacaagaaagaagtattgcagcctgtaatcccagcactttgggaggccaaggcaggtggatcacttgagctcaggtgttcgagaccagcctgggcaacatggcaaaaccccatctctactaaaaatccaaaaatcagccgggcgtgctccgggtgcggtggcaggtgcctgtaatcccagctactcacgtggctgaggcacgaggatctcttggtggaggttgcagtgaactgagactgtgccaccctccagcctgggtgacagagcgagactctgtctcaaaaagcaactaaaagttatctaaaaatwaaaaaaaagaagtattgcaaccggggaatccaaacaaaccagtctatcagaagaaatatctttgtgctaaggtycatagaaatattttacccaatttcccttcaggaaaaaaattaggaaagaacgttaatcaaaaaccaaatgtatttgaatgaaatccgaaggaacattaaagatgaagaggagaggaaacctatgaaccttgcagtatgtgtatgattaaatgtaaatatataataataaacaagctggaaatatataatatggctgcgaaattttttttagacacttctcaattgacaagatggaaatgaatagcaacttcattaaactagcaaaagtaaaggtaaaagaagaaaccatgacattaagtaaagaaggaataataccaagtatatcagatgtcataacaaaggtgaacaggctgatttcttccattaagaagcatatattatcagattaatttttaaaacaaataaagmtaaaagctgtttctcataaatacattaagttaaaatattttaaaatactttacaaaattcttgaatagttaaaaagttaaaggataaagagagatcagacaactgtaaacaaaatgtggacatcactacgaatattaggtaaggtaagatttaaggttaaaagcaccaaacattttaaagaaggacattatataaagctamatatatatggaggaaatgaagaaacaacaaactagatttagtagatacatgactttacatcccttaagtggagaacgtacatactttttgtaagtcagtggtacatttaccaaaattgttcttggccactaagcaaactttaacaaattcagccgggcgctgtggctcacgcctgtaatcccagcactttgggaggccgagrcaggtggatcacctgaggtcaggagttcgagaccagcgtggccaacatggtgaaaccccgtctctactaaaaatacaaaaattagccgggtgtggtggcrcacgcctgtaatcccagctactcggggggctgaggcaggagaatcgcttgaactctggagacagaggttgcagtgagccgacatagtgtcactgcactccagcctggcgacagagcgagactccgtctcaaaaaaaaaaaaaaaaaaaaaattcaaaaaggtagctatcttacaggccacattctttgatcataaggtatagaaactggaaataattcatggtaacatcaccaccacctcatgttttggaaattcataattacatttcagaaaactccagaatcaaagatgaaatgaaaattgaagttacaagttggaaatcaaggaaaaggagaataaccacttctacaacttaggggacccagagaaacttatattcaatgaaacttcgtaacctaaaaaaaaaaaaaaatatatatatatatatatatatatatatatatatrtrtrtgtatgtatgtatgtatacacacacacacacaygcatacatattaactcattgaacaaaaagaatatgtagccatcttaagacactaaaacagaggagaatgagaggaaatggtgtataggaggcaggactaacttggcagctcccactcagatggacagagcagtgtatggagatgcatatcgtgaacttttgctataagaactaccacaggaacgctccaggaaagcggagaggatccacagaccctttgaaggaagtggattgccgctgcaggcactgtgggacagccaaggaactgtgagttggctggctttctcagctgggtggcttaaagcctggggcaagtcctcagccctgctggaaataaactcagagctgttgtaggggcgcagtgggagtgaaaccagccctttaggctgtaggttgcatgggagctgggtgaagcctttggctgccggccttccccaacttccttggtgacctgtgtgacacagcagaggcagccataatccccctgggaacataactccattggcctgggaaccatgcccccatctaccacagcagcagcggcaagcctcacccaaggagatctgagctcagacatgcctaaccctgctcccacctgatggtttttctctacctgccctggtagctgaagacaaaagacataatctcctgggagctctatcggcctgcccaccacctaaccctagggcaagcatgtatcctttctatactactgcagctgatgccctcttgaaagtgccacctcctggctggaggccaaccaacacaaaaccagtacatttaacaaaaatacaaccaagggccctcatagaggccacttcactcccctgctgcctctacggttgccggtgctggtatccacggctgagagacctgaagacagatcacatcacaggactctttgcagaaactgccctgtaccaaccagaccccagtagctctgctggttggctagatccaaaagagaaataacaatcactgcagtttggctctcaggaagccccaaccttaggggaaggaggagagcaccaaatcaagggagcacctcgtgggacaaaagaatctgcagagcagcccttgagtcccagatcttccctctgacatagtctacccaaatgagaagtaatcagaaaaacaattctggtaatatgataaaacaaggttgtttaacacccccaaaggatcacacaccttaggggaaaaggattcacataaatacaaaaaattgacatagaatacctgacatcaagatggaaattaaaaaattctttgaactgaatgataatagtgacacaacctatcaaaacctctgggatacagcaaaagtggtgctaagatgaaagttcatatcattaaatgcatacctcaggaagtctgaaacagcacagacagacaatctaagggcatacctcaaggaactggagaaacagcaaaccaaacccaaacccaacagaagaaaaaaaataaccaagatcagagcagaaataaatgaaaytgaaaggacaacaacaacaaaacacaaaagataaatgcaacaaaaagctggttctttcaaaagataaataaaattgatagaccattagctagattaaccaacaaaagaagagagaagatctggtaaattcaattagaaacaaaatgggagatattacaacccttactacagaaatacaaaagatcattcaaggctactatcaacatctttatgcacataaactagaaaacttagaggagatgaataaattcctggaaatacgcaaccctcctagattaaaccaggaaaaaatagaaaccctggacagaccagcaacaagcaatgagattgaaatggtaataaaaaagttaccaaaaaaagtttaggtacagactcacagctgaattatatcagacattcaaagaagaatttgtatcaatcctattgacactgttccaaaagataaagagggattcctccctaaatcctcctgtgaagccaatatcatgctaataccaaaaccaggaaagaacaaagacaaccgcagaccaacatccctgatgaacatagatgcaaaaacccccaacaaaatacttgctaaccaaatccagcagcatataaaaaatataatccaccatgatcaagtgggtttcataccaggaatgcagggatggtttaacatatgcaagtccataaaggtgatacaccacacaaacagaattaaaaacaaaaatcagatgattatctcaatagatgcagaaaaagcatctgacaaaatccagcatcccattatgattaaaaccctcagcaaaatcagcatagaagtgacataccttaaggtaataaaagccatctatagcaaacccacagccaacattatactgaaaggggaaaagttgggaagcattccccctgagaactgaaacaagacaaggatgcccactttcaccacttctattcaacatagtgctggaagtcccagccagagcaatcagacaagagaaagaaatcaaggacacccaaatcagtaaagaggaagtaaaactgttgctgtttactgataacatgattgtatacctagaaaaccctaaagactcatccaaaaagctcctagaactggtaaatgaattcagcgaagtttcaggatacaaaattaacatacacaagtcagtagctctgctatacaccaacagtgaccaagctgaggatcaaatcaaaaactcaaccccttttataatagcttcaaaaaagaaaaataaaatacttaggaatatacctagccagggaggtaaaagacctctacaagacaaaacactgctgaaagaaatcatggatgacacaaacaaatggaaacacagctaaattctacatttggatgggtagaatcaatattgcgaaaataaccatactgccaaaaacaatctacaaattcaatgcaacttccatcaaataccaccatcattcttcacagaactaggaaaaaagagcctgcatagccaaaacaagactaagcaaaaagaacaaatctggaggcatcaccttacccttcttcaaactatactataaggccatagtcaccaaaacagcatgctagtggtaataaaaataggcatatagaccaacggaacagagtggagaacccacaagtaragccaaatacttacagctagctgatcttcagcaaagcaaacaaaaacctaaagtggggaaaggacaccctattcaacaaatagtcctgggacaattggcaagccacatggaggaaaatgaaaatggatcttcatctctcaccttctacaaaaatcaactcaagatggatcagagacttaaatctaagacctgaagccataaaaattctagaagataacattgataaaacccttctagacattggcctaggcaaagacttcatgaccaagaaccgaaaagcaaacacgacaaaaacaaagataaatagataggtcttaattaaactgcacagcaaaagaaataatcagcagagtaaacagacaacccacagagtggaagaaaatcttcacaayctatacatccaacagaggactaatatccagaatattcaaggaactcaaatcaagaaaaagataaacaatcccaacaaaaagtgggctgacatggatagacagttctcaaaagaagatatacaaatggccaacaaatatgacaaaatgctcaacatcactagtgattagagatgtgcaaatcaaaaccacaatgtgatattaccttagtcctgcaagaatgaccataatcaaaaaatcaaaatatagtagatgttggcatggatatggtgaaaagggaacacttttccactgccagtgggaatgtcaactagtaccaccactatggaaaacagtgtggagattccttaaagaactaaaagtagtactaccatttgatccagcattcccactcccgggtatccacctagtagaagagaagtcattatacaaaaaagatactcacacatgcatgtttataacagcacaattcgcaagtgcaaaaatatagaaccagcccaaatgcatatcaatcaacaagtggataaagaaaatgtgttgtgtgtgtgtgtgtgtgtgtgtgtatcatggaatactactcagccataaaaaggaatgaaatcatggcttttacagtgacctgggtggaattggagaccatattgtaagtgaagaaactcaggaatggaaaaccaaatattgtatgttctcactcataagtgggagctgagctatggaggacacaaaggcataagaatgatacagtggactttggggactcgggggaaagggtggaagtggggtgaaggttaaaagactgcacattgggtacagtatgtactgcttgggtgatgggtaccccaaaatctcagaaatcaccactgaagaacttatgtaaccaaacaccacctgttccccccaaaacctattgataaataaaaaattctaaaaattcaaaaaagtaaaacaaaaactaagtaatatatagtagatagaaaatacaggggctgggcatggtggctcacacctgtaatcccagcactttgggaggccaaggaggtgaatcacctgcagtcaggagttygagaccagcctggccaacatggtgaaaccccatctctactaaaaatacaaaaattagccaggtgtggtggcagatgcctataatcccagctactcaggtggctgaggcaggagaatcacttgaacctgggagttggaggttgcagtgagccgagattgcaccacagcactccagcctgggtgacagagtgagactccgtctcaaaaaaaaaaaaaaaaaaagaaaaaaaaggaaaaaatgcatacatagatatacatacatataatatacatcctataaaagccatttaaaacattaaaacaaaaataaaaggtaaaaactgaaattaaataggaaatttgggcaagcatgtgccatagaagaagcaagagactgataaaatatttaacaatcagtttggcatggaaacgaactaagccaagtgaatgctagctattaataaccagtaagcaatgcttttatataaaaaagagattggaaaggtgattttaaaagacaccagggcttgctttttgkccttacccttctaccccaggctcttctgccttccctcttctctttccctttttaccctccctcctttatgtgtctactctttcctctctccttgcccattttcccttctcttttccctctactcctatgycattgtgttgggggaagtcctcaagaccatccccaggttttatgattttctagaagggctgagaactcagcatttaattatgactcaattactcatgactgtgatttattacagtgaaaagatacaagataaactcagcaaagggaataggtgcatgggcaaagtgtggaggaaaccaggcacaggcttccaagaatcctttcctagtggagtcacacaggacacactctattcctttagcaacaaattgtgacaacatatgtgaaatgtctatcagggaagctcattagagactcaatgttgaaggtttttactgggtaccgttcataaaggcaccctctatctagcatgtaccaaaattccagactcccaaaagtagagcaggtattcatcataaagcacattattttctcaaatagtttaggcacagtgagccattcttatccagtcatggtgggcaccctcctgaaatcccagactgtaaccaagagccaatcttgcaagcagaactttttaagggtagccgtctcaggcctgctatgttaacctatgttttgtacaccttgtctcctgccactccccacctctctttccctttatagtattattgcccttttcccttcatcttaaactctccttctagttcacagacaattcagtcctgaagtcattatgttgggcagaggtaagctttcycacttagtatgggattaggtttcctagagtggaatttcagagcctgagcaggttgaggaagtagtttaattgtggggacatacaaatttaggtgataaggattttagaggagacagaaatcagagcccaagctgttgggggaggggatggtagtggagatgggagattggttacatacaggggattgataaatatattggtagtaatgggagccatgcttcttactgggagccatgcttcttactgttaggaagagggagctgaaggaaaagatgattacctttatacatgtttgaatgatactgtttttacttgttacaaagagcatatattctgttgtaatttgaaaaatgatcatatggaaaaatattttcagaaaaatggcaatttcaatggaaaaatatgaaaaaaaaagttttgatgaaatattgaagttcagaaatgacagaacagcatagtggtctggggaaagaatgtcaaagttcagggctgaatgtggtggctcacacctgtaatcccartactttgggaggtgaaggtgagaggattgcttgaggccaggagttccaaaccagcctgggcaacatagcaatacttcatctctgcaaaaaaataccaaaacttagccaggtgtggtaacatgcaattgtagtcctagctatttgggaggctgaggcaagaggatcccttaagcccaggagtttgaggctatagtgaactatgattttgccattgcactccagcctgggtgacagaggaagaccctgtctctaaaagtaaatttaaaaaaaaatttaatgttaaagttcaaatgcggctcagccaaatattagctgtgtgaccttgggcaaattactcttctattaatcttataatcaggagatgcatttaataataatcaccactcctgggactaccacttattacacttcttattactacctattacaatgagtagtaggctttttttttttttgagacggagtcttgcttgctttgtcacccaggttggagtatagagtgcagtggcatgatctcagctcactgcaacctccgtcccctgagttcaagcaattttctcacctcagcctcctgagtagctgggattataggcatgccccaccacacctggctaatttttttgtatttttagtagagacggggtttcaccatgttggccaggctgatcttgaatcgctgacctcaagtgatccggcctccttggcctcccaaagtgctgggattacaggcatgagccaccatgcccggcctggctttttatattagctgttattgttattgatcaaagtcagataactcattactgtttgtctggrtatttaaacctaaggctaaattgcaatgtatatagatgtattgcaataaatgtcacccaggctggagtgcagtggcgcgatctcggctcactgcaacctctgcctcctgggttcaagcgattctcctgcctcagcctctgggattacaggcatacgccactaggcctggctcattttttagtttgtttttgtttttgtttttgtttttagacggagtcttgctcttatcacccaggctggagtgcagtggtgtgatctcggcttactgcaacctccgcctcccaggttgaagtgattctcctacctcagcctcccaagtagctgggattacaggcacaggccaccacgcccagctaatttttgtatttttagtagagacggggtttcaccatgttggccagaatggtctcaatcttgtaaccttgtgatcctcggcctcccaaagtcctggaataacaggcatgagccgccgcacctagcctaatttttgtatttttagtagagacagggtttagccatgttggccaggctggtctcgaactcctcacctyaggtgatccgcccacctcagcctcccagagtgctaggattacaggcatgagccactgcgcctggcctgcttgtcattgttgtactatatgtaatgtctagaagacaaagggccatgtatatcttcaaatcagatactttatactgctaaaatgatttccaaaatgcttataattacttgtactaatgtcaatgaatgaaagtatcagtttatgcctttccagcattgtgcattgttatctttttaaaaaactgataattttataggccaaaaatttataatttgatatttaaactagcattattttaatcaataatgaatttagaaataattctggttaaattagtgtagatgctaataacagccaacagattaagagagattcaaatagttaatattcgctagatacttacaatgtactaggcattgtaattagcaccttttatatacaaactcatttaatcttaataatatgctcaccaggataatgatggtttacagttataaaatatcagaaaygtcatttgtcttagtttgtgagagtacttgttaattatttgtattgatatttaagtggctttatttaaatacacataaatgttaagttgaacatagtctcttttcttttaagacaggatctcactctgtcacccaggctggagtgcaatgaagtgattatggctcactgcatccttgaactcctgggctcaagcaatcctcctgcctcagtctcctgcataggagcccaccaccatgcccagcttatttttattttattttttgtagagatggggtctcgctatgttgcctggggtgctttccaactcctggtctcagggagtcttctcacctcagcctcccaaagcgctaggattacaggcatgagccactgcacccagcccatactcattttttatttctgtccgtctttaagaaacatttcaaggaatttttttaatcctgtaatttatgcttttgtccattagatgtcctcagctacatttatcagaatttaacttttttcgtacaaatttccgtctttaaatacctttaaaagtttgcatgtaattgttactactgctgatattttaaacatttatacaagatgtctaaaaatctataaatacrttaggatgtgtggtagaagatttagacatttcttgtgatttttgtaccataagtaatcttggttaaataagaaatttttaaatgttaaattacttgttaatttctttctcccccttttatttttaagagttttgggactggaattaaataaagacagagatgttgaaagaatccacggcggtggaattaacacccttgacattgaacctgttgaagggagatagtaagtttattatacttgtataatcatttttctttctaagtgaaatgcagtaaaacctgctttttcaaattaatgatgtagaagtttcattaaaattaatgaaaatcctaaattgtagcatttttgaatctggcattattaatttcaagtaaatacaaaacatcgaacctaccaaatgttgtcaaataaacatttccaagctactttaatataaatatttacttattgttaaattaacaaacattgaacttcttttggatgcagagggcttttaggtgctagaatgtgtctttaggtgctattttaaaacatagttgctactctcaaaaaagtctaatggtaaaataaatataaaaagtgaaagactcttttgaagaattagattagaaacaaataagaattatatttgagttcttcctggctttacccttacctaacctttcgaattatcagttgccttagctatacaatgggaacaatagtacctacctaacaagcttgttttgaagattgagataatatgcacaacatgattaacgtaagacctggcacgtcataaacagttgccaccactgctgccactattaatcaaaagcagtattacatatacttttactcctttcagcccagtctctacacagcagccaaaatgctttgaaaaactcaattctgaacatattctcctacttacaattcgtcataacactgcattactcttaaaagaccgtacaaaacctttcatgtggcctacaattaggccacatatagcattaactaaaggaagcagtttgtgttatggtatgtttcatgtggcctataattaggccacatatascattaactaaaggaaacagtttttggtgttatggtatgtttagcatttcccccagaatttttattttatactgaaatattattattaatacattaagtcaagtcagaacagattygataaacttccactttttacttccagcttccaccatggtctcatctactagtatatgagaaacatcttactttagcatgtggttaaatctaaaagatgagtaataattcttttctttttcctgaccttttccaggctcagtgtaacaccttctattcaaggacagctgggggggcactcacttatgaaacatgcagacatgagcagcaggagatagctgacttttgggtttggatgctggtcaggaaagtaatcaatactgttactccagccagccacttggtgtagtaatcagttgtgtggcctgtgatgtatgagaagccagtagactaccagttggcagagttggtgagaaatatgggaagttacagattatatgtgcatgaaatatatttgagaaatgcagatgaggcatcttttaatacagcacatagagaaaagtctgaagactcttgctacagtgattttccgctttattgcacggtaaaagtctacaactatttcattgtttgctaagacttgtattttgcattaaccccttttgatagcaacaagagatattaaaaggaaagcgtacattctgtggaaaactaaaaaaatcgatgtgtatataacttgttcaaaacacctgttaatatttaccatccaccatgagagctgtaaaggtgtcactgaaaatcagattggaaaccagacagaatacacaaatctggcagagattttcaaagtaaggtgttattttacaaaaagtatctgaaaattacagtttaacaggtgcaactgcagagggtgcatttgcgtatcactctgtgaagcttgaattttcttttataccttttaaattcttctaagttaatttcattcatctttaatactaagttttcttgtctatataaaaacatgaaaccatatctcttcatactctatcagcaaaaagtatctcatagttaatgtcagtgccatcagatacttcaaatagaaagttaatggaatcagagaaaagcttttggaagccattttaacagagtcaaaacatctgacattattgtaaataccatatcaattaagattaaaatttcaacttttaacataattttgttttatattgataatacatctgtatggcaagaaaagcaacgtttcatgaagattaattacgaagcaaaagtgttttgggaattggttgtagtatacatgtaactcacaactgtgtccaaacattttatcaatctaaataaaagttgtagttgttaaaatttacaaatatttctctatgtacacaattagagtaactgaactacaaaatgtaataaagctaatgtggaatattttttaaaataactaagtagggcattattagcagtctttctttactgcccatcaattggatttttgagccttcaaataactacttttaaattaaccctattgttttataaattggtattgaatttatcttaaaaacaagtctataaatcaatacatgctactagttcatgaactatttgtgactgggtcacaagataaggatcttgtgctaaaacataaatctactacatcattacacacaccatttaaaggagctaagacatgtttgtaacaagacattctcagtgaagaaagacgtgtgtttgtttctggtacaagctccttatcttggagagttaaatagcactgcctctacatttaattgtattttgttcaaaatcagatgaaaatctttcaatcaaaatactcagtgaatgtagtgccaaaaactgtagtttgggtgccattcttgaaagatgacaggccgggtgcagtggctcacacctgtaatcctagcactttgggaggccgaggcgggcggattacctgaggtcaggagttcaagaccagcctggccaacgtggtgaaaccccgtctctactaaaaatagaaaaaattagccaggtgcagtggcgcgtgcccgtaatcccagctactctggaggctgaggcaggagaatcacttgaacctgggaggcagaggttgcagtgagccgagatcatgccactgtactccagtctgggctacagagcgagacttcttctcagaaaaaaagaaagaaagatgacaatgtcaatgcagtttttaatgttcctctagttctccattaaaacacataaagagactaaaaatggcaaataggaaaaaccagattaacacttacaaccaaactaggtcatgaagtatccctacaaaccccaaactgtgaataagtgggaacaaaccactgacaactaaaagatctgtgcactaccagcatttttgctagaggaggcagtaaaaagcgataaggcatctgatatacctggataagtccaaagtaaccaacaggttggttgaaaacttagcaagcaaatttgactacagcagctcaaactgggagaagatggcatactctaattgtagatatgtttgagtggyccatggtaagaccagaaggagctatagcagtctggactctaatatctttccaaagagctaaccagtcaaagtgcgcccccagtacagaactatatactgaggaaaactgctggaaatagaatccaaattgagcagtacagagacaatagaaacaaaggaaaaagatgtccccgataaaattggaaaggtgaacagaaacaggaaatctctgaaagtaagcttccatattttgaaatcttaccccccaaaaaaaatttttaagggaagaagaggatgttttaatatataaaatttaaacattattgtaagtcaagcctccattctaaaaggttaagaaaattaattttacataaaaatgagcaaaggaataggattaaggtcaaagttcctacaaaatcattataaaaacaaagagaataagaagtggactaaagctgctacagatagtgaagtcacaccggaaagaagtatctataaaacagatgagaactctaacctaatatttcaaaactaggtaaaagttgttttataaacatataataaatgagagaataatgttaagttattagaaaacctcagaaatgagatgctcaaactcagaaaattagaaataaaaatatttcagaaatgaagactgactaaaacttaaagaacacaaataaatggaagaggtaatgccttagaaatagaaactagaaaggaggaaaattttaaaagccaaaaagaaatgaacagaggaaaataattcaagaggtgtatatatagaacataggcaaagaagatccagcataacatatgatagaagttcccaaaaaagaaaccaaggcaaaagagcagaataaatattaaaacaataattcaagaaagcttttctaggataaataagatctggaactttatataagagggggggatttatattgtcactagactttgactttgggctttctggcagaagaaatgaagcttcttatccaagatgctcaaggaaataaaatgtgagtcaaggattttatatccagccaaactgatttcagatacaaaaaggacggataaattgtcaacaacacaagaattcagagactgttgttctcattagccattccttaggaatcaaccagagaatgaaatcattcaaccagaatgacaagagagacagcaacttaaggattgacggtgagcaataatattagcagatagcaacactttatataaatgtataaattgatggatctagatattggtttgtctgctaatatcacatcacaacaaagagcaatgggaaatagaaattattttaaattatagcacatgaatgcagtcaccaaagtccaggctggaaattacaggacaaatgatctggtttttgcaacaaataaattacaagagaggggaaaagtacaggagggaggaagaaaggtagaggagacctatagcttaaagttaaaagacattaaaatttttttaaaaagcaaagctaatattcatgtgtacactctaaggtgatgaactatgaactatacagaagagaaagacagtgactacgataaaaatcatgataatgagttactttgaggtgaaaaggaaagagtgatgatgtagagagattgcattgtttggatctctgtgaagaatttttgatggttcccctatttttgattgggataaatgtatatttgtaattgggataaatgtatattttgtaatggaataacattcacaatgtctaagattttataatatttaaatttggtgtaacttccaaaagagacataaagaatttgttcaaggagaattttgtcttgtaaaaaaakaagtatactaaagaaaggtactttgaattaaggtaaaaacagtgaaaataacctgaaatatttgcacatttcaagaatatcctccattttgcagaattttctctgaacttaycatatacctcatcaactattgttatttcctaaattaaacattatggcttttagggaagtcagttaaaggtgtcaacaactccagatttaaagatgatttttagacaattttatgccaaaaaaactaataagatcatattgaaaaatcccatttaaaaaaacacagtaacagtattagagacaaatatggttaagaaactgattaaagtatatgaagtaccaagaatgattttacaaattattaagttcaatcaatgtatatagctttagtatatatgcttgttacttttactttttagaaatatttttgcaaagtttttgaatagaataattttgtaggttctaccaatataatagaccagcttgagagtgagtcaataattgtttccaaaaaaagatactgctaattttttagcaccctcttttactcccaaaagtaaggcttccagtggtttggctcctgcctctcatctctcaccactctttcccttccacactgctccagcaacaaatcccttcttttggttcctagaatgggcttggattgttactttcacacctttctggctaactttgaatcatccttcacataccagcttaaatattgcaatcagggaaactgctcctgaatttccaaactagaataaaaataagttattgtcacagtgatcccaatcataactaataatttgtgtgattatgcatactacttgttttccctattggattgtaaactctgcgaagacaggaaccatgcctgccttgttgacagttgttttagcagagtgtctaacattgtaggaacttaaagttgaatgaattgagtgaatgcattcataagagaaggaaggaatctaacatttattgagcccctattttttgccaggtactataaaaagaattttgcacttttattatcaacactgtgattcaggtaaaaatgtccccctcctttacaaatgttgagtcttagacaggtggtataacttgcccagagccaaatagcaagtgtcagtaatagttggtttgtctaattccttttttatttagcatagtcataattaggacatttaaaataactttgtaatattttactttcttaagaaatctcttttgccgtcttgtttctgtcaccctttctttttgaagttatggaagtaaacttgaaatgatcacagaatgaatttttttatattcattcttgtattaaatattaagaaattttagtttatgaagtctgtgttattgaggattaacttattataaattaatgtatccttaatacatttgagtgtttgcaaatcagtttttagaaatttgcaatcataaataaatggactaaataataaataaaatgataaattaatgtgaacttttttattatcagcatgttatcaggtggttcagatggtgtgattgtactttatgaccttgagaactccagcagacaatcttattacacatgtaaagcagtgtgttccattggcaggtatgtatttaaaatgtaaaaatttatgaatttgtaaatagttgagtattttttgcatcgaatgcaaaacatgaaaattgcagtcaagtgaatgggtcaagcgaatggttcacataacacatttgcatggctgttccttgacactttcttgaaaatagtaactgacattcaggtatagttttttaacatgtgtcttccccaaagcaacttcagtatcaattttcattagkattttatttttaaaaaacttgtgattatgtccttctttttctttacctacatagcacatctcagtaactaattagagtttttagtaccacttagtgtaagattcatttatagtccttcagctaattataaacacaaattagattttcacctgatactaatggaagaaaaaggtttagatatactaaacatattggtattccctcaccaaacacacacatacacatatacccactcacccctgtcttgtctctctacttactcaaagatgtctaacttaaaaacatacatctgtaatacttgtcttctctgactgttctctactggcttaccaatcttgtgataattttttttaagtctctaataaaatgttttgtgacattgtaatttttccattgtggtcatttaatcctttctcttcacctacattcaatctgataatgagcagacctttgaattaacagggagaatgggcactgagaaaatgctttcaagagggaaaactttgtaaacattaacatcaactatctattacagctcttcccaaagcattagaatatatgctatggaatatttcggaggagatttgctattgtttgttggctctggtgtttygcattagaaatacaaatttgggaaaatcagttaatctcagcttcacattattttattttagaaatcagtatacatgccctgtggttcttatacgtttctatgagaattaaatgaaatactatctttttaaaagcgtgttgaaaaccgaaaccactgcataagtgaaaagcaatgtacttacaggaatacttagtacaaaacaagatatcgcctcaaatactctagaacttagagacttaggccatatatactctcttcccaccctcaataacaaaaaaagtcatgttaattaattaaattcatttttatcttatttttatcctagctaacattttaacattaaatttattttgttacatagcaaaatagtattttcacctattctacgtgctacataatattccatgaggaactgtgatttgctttgttttggtttgtgacataagtaaatgcgtaatgtgtcagtcttgttttactgtgattttattcttggattcagattctatatttaaaagtgtgactttgaatttgaaaatggacatatagtatgcatctttacaaaatgagttataataacattttatacatctgaaggatttacaatccaatttaaaaataatttcaataaagactattattaagttaatgtgacttagactattttctgatgcttactattagtatacttaatgtgtttgtccttgagcactaaaaagattcctttcctctaccaaaattcttattaaatataaatgaaaataacagaacatatatagtaacataataaaatatcctattttaaaatttaaacttaaaatataagtgagcttttatttgttatcactacattaaaaatttgtttcatttaaaagtagtatcactggaaaaatctctgtagaagtcaatattcttaggagcaaaaggaaatcaatctgcttatcttaagcgaaatttattggaagaatatttagtatctcacataactgtcaggaagrtgggagaatcagacttagaaaatgagcagaaaacaaaagaagtcaggatagagaacacagtcagggtcacaccacaggaacattagtttgggttttgctatatgtcaccaacgcagactctcaactcctcagctttgaataatggctaactctcctaggaaaagagaatgtctagagtcccttgctttctgtaagaagaggtagagctcttattttcagtaaaacaaagggcatttcctctaaataggagtttgaatgctcatcagccaagaaaaaaaggcacatgttccctacaatccacccatttggctgtccagcatgcgtatacacctttcttcccataattactgttttttaaaaaaatgttccagcctaacctaatgcaaatcttcactatacagccaaaaaggtgatcatcctcttccccaaagggtgatgatcctaagttgatttagttaccacacctggctccatttcaaggtcatgttcatttttccactagtttaatttatcctatatcagtattatacaatttgtggactcaatgatatagttaacctakaaaaataataaaggtaagagaggaaagagaaaattagttaaaatatatgaatatttacagagaaaaaaaggaaatatgagtaggcactatagttcttgtatttttgcagctgttttaatgccagagctggcacttaagactttccttctttgtgttctcattccttcagatagcaccacaaatgttttaaggtcccaaaccttcatcttaaggaatccaaaagcatcacggttgtatctgcatagggttgcagaagtcttctgttaacttttgttttctatgggaaatttcaaacatatacaagattggagagttgtataatgacctgtgtatcaatcacccagcttcaccaaccatcataaccaatcttgtttcatctctacctcccacccatccaccctcataattatgttgaagcaaatctcgaacaacctatcgtttattcataattatttatatctctaaaagataaagactttatgagcataactacagtaccactatcttaaatacacaaaaattatctatattaaatatccagtctgtgttcaaatttccctcttcgtctcataaatctctcttaaaagccagtttgtttgaatcaagatccagttaggtaacacactatgttggtcactggttcagagcatatactgcatccttcaggacagcataccaccctcacaaggtggtgtattgtagctgacgtcatagagtcttcaacatgttatgtttttatggatggtgggttacataagatgtgaatctcatgggcctacaccagttgcattctttggtcatagaataagttccttgataagaagcaatattgtatagaataccatggaggtgtgtgaggcattcaataattctaagaatagtagtgctaatagaatgagactttggaaaagcaaatccaaaaccaaaacagctgtctcttccagtaagaccaaatcactctttcaagatgaaagaagwccagtgtagttggctgatgcctccaggctgtatatagtacaaaaacagagaatctttcacattgtgacccttagtaggaggtatgtctctacatcacacagtgggagcctgaatctagagatgcctggacattctttctcgccttctacacagcttggacacaggcatgtgatctcggtttggccattcatatcatcctacctgagactactacttgttcttaatatagtaccagttttgaaactcacataagtcagttaatgtaaattttgattgctgttttgtagagatcatcctgatgttcacagatacagtgtggagactgtacagtggtatcctcatgacactggcatgttcacatcaagctcatttgayaaaactctgaaagtatgggatacaaatacattacaagtaagtacattaaaacatttgcagattgctttgtaggataaaggagaatttaatcctaaaccattttagtatgattatttgctgagatgtcatatatgttagatgtgaaagcagtacagtggttaagaagagctagactacttgagttcatatcctggctgtgctgctgacagctgtatgacattgggcaaatgtccaaacctctgtgtgtctttctcatctgtaaatgggaataatgattatagtatggttgtgaggattaaatgagccaaaatatgtaaagtacctagtacagtacatagcatatagtaaatgctcaaaaactgttagctaatattattatccctttgtgaaaaatactatgatctagtaatctaaagtagaaaattggatttatctttgattgatctaaaaacttgaaggagaaagctgttaatactgtagcttagtaaagacaagcaatggataatagtttgtatgacatttggtcaaatttacattccgagtgctaatcttttctctgagctctactctgatatgtctctacttttctacagtacctctatacttaaatgtagtgtcatcccttcaaacttaacatggtcccaactgaacatgatcacatctcattaaatttagtcataaaatcttagcaatcctttcttcaaactctctcatacctctcttttctatttaccttgcctttactgcacatctggactactaaaatcactgccttaccttctacattttctacactaagttctaccccagaattaatcttattataaagcagtttcatcatgtcactacccaaaccctctagggattcccattgtctaaactcagcctggcattccaagttctccatgacatcaacccttgttccttcaatcctatgttctaccagttttcaacacaaatgctttgctgcaactaaactgatcgtgttttgaatctgttgtattccctacctcaagtccctttcccttgcaactcttcccttctcctaaggtcacatctttttttacaattacattgagccaagactgtagatgccagagttctagttccattctgccacttatgagatttgttgctttagataagtcatttaatttgttagcaaaggtctcttcagctataaaattaaagtgtcagactagatggtgtctaaggtcccttttagttctatcatgcagtttagtgatttcagcttctggagtaaatattaaccattattttactttatagcactattttctgtattcctatttcaatacattctcatactactttataatatcattttcatacttgtttgtcttatttgttgttctagattgttacttccccaaagaaagtactatgtcttatacattactaaattcagtgctatgtacagtaactgctgagtaaatgctttagggatgactaacaatgtatgtaactggccacatactaaaaagtaataaaatcatgaagtatattatgattctagtgagcaaaacaaaacagtgttgtgtatataaatgtaaatttaatatacttctaataattcaaactaaatagatgtgtttttttgaccttgctacattagaatagtcctattatttcagatttatttttataataaagtatatttatttaaaatacatgtcattgaaaatgagagtatattttaacaattaaatgaatgtcatgacctttcacttctgactataatggaatatcttgtagccaaaccagcacctccattgagaaaagctagataaagcataaacaggcatctagttgagggttttataaagctgccaagaaatctaggaattgagaatcagatcctagagaggggaacacttacagaaatgcattcaactttccacacactctttttctctttggacatttgtcattaaagtaaggcaagagactgagaagacaggcattggatagcttctaagaggcagataaatgagtgggactttagtcaatttcataaagctagagagacagaaattggaatgtgggctgccaagacagccagaaattaaagggtcaagatcacagaaagaagagagatgcagagaaatcagcctaacatcttgcactggttttttctttgagatatttgctgaccaagctatgcgagaccatagacttaagaaatgaagcagaagacatttgaagaacagcaattttccccagtcacatggtactggagagaagaattgcagtgcagtacttgctaagtagaagggggcctaggaaaacacccaggctcttagggcacctagaggggaatactctaataatgggtacaaataggaggtagatggagcctgtggtaggcagcatcatgtcccgctcccagatgtctatgtactaatctctagaacatacgaaggggaattaaggttgccaatcacctgacctcaagacagggagataatactgaattatcctagtgggcccaatgtaatcataagaatcttaaaaaatggaagtgggaggcagaaggagacggggtaaatttgactgggagaatggccagagaaatgtaaaattgctagctttgaagatggattaaggggaycacaagccaagaaatgtgggtggtctctggaagatggagaaagtattctctcctagagcctccaaaaaggratgcagcctgtcaacaccttgattataatccattgagacctatgtgagaattttaacttgtagaacagatttattacagataataaatttgtgttataaattactaagtatgtggtacttactaagtacagtaagtactttccttactgcatcagtagaaaattattacagaactctacaatagcagacaagctttatgtttgaattgatatgatcttccctctcctacctgcaaaagagagattggatcttctctagaggaggataacataacgcagaatctctcccaattttttctatataatttctagcactcaaaacagaaacttccaagcttaccaacaaatgagcttaggagtaaaaacagacaatagaagaagactgacatctccaggcctaggtgcctttacgagtaagttattctaaacacttaaaaaagagataataccaatcttatacaaatgcttcaagaggaaaaaaaggaacttytgtaaactttttttatggggccagcatatccatgatttcaaaatttacaaggacattatatggaaaattacaagccagtgtctcttacaaatataaataacaaaaatcctaaatcaactattaatatgtagaatctagcaacatacaaaaagaataatatatcatgagtggacaaaaaaggttgttttaacatctataaatcaactaatgtaattcatcatgttaatagaatgaagggggaaaactacatattagtcatctcaatagatacgaacattttgaaataaaagtcaatatccttttttttttttttttttttaararacaagagtcttgccctgttccccaagctagagtgcagtggcgcaattataactcactataacctcaaactccgggctcaagggattctcagctcaggctccaaagtagtgaaggctacaggtgtgcaccaccatctccggctaattttttaactttttgtagaggcagtgtctctctgtcttgcccaggctggtgtcaaaatctggcctcaaatgatcctcccaccttggcctctgaaagtgttgggattacaagcatgagccactgtgcccatcctcatttttaaaaattctctgcatactgacacacataggctcaaaataaaagtatggaggaagatctaccaagcaaatggaaagcaaaaaaaaagcaggggttgcaatcctggtctctgataaaacagactttaaaccaacaaagatcaaaagagacaaagaaggccattacataatggtaaagggatcacaacaagaagagctacctatcctaaatatatatgcacccaatagaggagcacccagattcataagcaagtccatacagacctacaaggagacttagactcccacacaataataatgggagactttaacaccccactctcaacattagacagatcaatgagactgaaggttaacaaggatatccaggacttgaagtcagctctgaactaagcagacctaatagacatctacagaactctccaccccaaatcaacagaatatacattcttcccagcaccacattgcacttattccagaattgaccacatagttggaagtaaagcactcctcagcaaatgtaaaagaacacaaatcacaacaaactctctcagaccacagtgaaatcaaattagaactcaggattaagaaactaactcaaaaccacacaactgcgtgggaactgaacaacctgctcctgaataactactgggtacataacgaaatgaaggcagaaataaagatgttctttgaaaccaatgagaacaatgacacaatgtaccagaatctctgggacacatttaaagcagtatatagagggaaatttatagcactaaatgcccagaagagaaagcaggaaagatctaaaatcgacaccctaacatcccaattaaaagaactagagaagcaagagcaaacaaattcaaaagttagcagaagccaagaaataactaagatcagagtagaactgaaggaagtagagtcaccaaaaacccttcaaaaaatcaatgaatccaggagcaggttttttgaaaaggtccacaaaactgatagactgctagcaagactaatgaagaagaaaagagaggagaatcaaatagacgcaataaaaaatgataaagggaatatcaccaccaatcccacagaaatacaaactaccatcagagaatacaataaacacctctatgcaaatcagctagaaaatctagaagaaatggataaattcctcgacacacacaccctcccaagactaaaccaggaagaagttgaatctctgaatagaccaataacaggttctgaaatagaggcaataattaatagcctaccaaccaaaaaaagtccaggaccagacggattcacaaccgaattctaccagaggtacaaagaggagctggtaccattctttctgaaactattccaatcaatagaaaaagaaggaatcctccctaactcattttatgaggccagcatcatcctgataacaaagcctggcagagacacaacaaaaaaagagaaatttacaccaatatcccaaatgaacatcgatccgaaaatcctcaataaaatactggcagactgaatccaamagcacatcaaaaagcttatccaccatgatcaagtgggcttcatccctgggatgcaaggctggttcaatataggcaaatcaatacacgtaatccatcacataaacagaaccaatgacaaaaaccgcatgattatctcaatagatgcagaaaaggcctttgacaaaatgcaacagcccttcatgccaaaaactctcaataaactaggtattgatagaatgtatctcaaaataataagggctatttatgacaaacccacagccaatatcatactgaatgggcaaaaactggaagcattccctttgaaaactggcacaagacagggatgccctctctcaccactcctatttaacatagcgttggaagttctggccagggcaatcaggcaagagaaagagataaagggtattcaattaggaaaagaggaagtcaagttctccctgtttgcagatgacatgattctatatctagaaaaccccatcgtctgagcccaaaatctctttaagctgataagcaacttcagcaaagtctcaggatacaaaatcaacatgcaaaaatcacaagcattcctatataccaataacagacaaacagagacccaaatcatgagtaaactacattctcaattgctacaaagagaatgaaatacctagaagtccaacttacaagggatgtgaaggacctcttcaaggagatctacaaaccactgctcaatgaaataaaagaggacacaaacaaatggaagaacattccatgcttatggataggaagaatcaatatcgtgaaaatggccatactgcccaaggtaatttatagattgaataccatccccattaagctaccaatgactttcttcacagaattggaaaaaactactttaaagttcatatgaaaccaaaaaagagcccgcattaccaagacaatcctaagccaaaagaacaaagctggaggcatcacgctacctgacttcaaactgtactaccaggctacagtaaacaaaacagcatggtactggtaccaaaacagagatatagacctatggaacagaacagaggcctcagaaataacaccacacatctacaaccatccaatctttgacaaacctgacaaaaacaagaaatggggaaaggattccctatttaataaatggtgctgggaaaactggctagccatatgtagaaagctgaaactggatcccttccttacaccttatacaaaaattaattcaagatggattaaagacttaaatgttagacctaaaaccataaaaaccccagaagaaaacctaggcagtaccattcaggacataggtatgggcaaggacttcatgtctaaaacaccaaaagcaatggcaacaaaagtcaaaattgacaagtgggatctaattaaactaaagagcttctgcacagcaaaagaaactaccattaagtgaacatgcaacctacagaatgggagaaaatttttgcaatctacccatctgacaaagggctaatatccagagtctacaaagaacttaaacaaatttacaagaaaaaaaaaaacccatcaaaaagtaggcaaagcatatgaagagacacttctcaaagaagacatttatgcagccaacagacacatgaaaaaatctcgtcatcactcgtcatcagagaaatgcaaatcaaaaccacagtgtgataccatctcacaccagttaggatggcgattattaaaaagtcaggacacaacagatgctggagagtatgtggagaaatagggggagaatgtggagaagtagggggagggatagcattaggagaaatacctaatgtaaatgatgagttaatgggtgcagcaaaccaacatggcacatatatacctatgtaacaaacctgcacgttgtcacatgtaccctagaacttaaaagtataattaaaaaatatataaaaataaaaataaaattctctgcatactaggaatagaagagaaattccttaatttgatacaaagtatctatttttttaaaaaactaaagcaaccattttatttggtggtaaaatgttgaaagctttccctttgcattatcctcattatttcctctgttcaacattgtactgaatgtcctagtcagtgcaataaagcaaaggaaataaaagggataggaactggacaggaagcatttaaactgtcattcacagaagacatgattatgaacgtagaaaattcaaaagaatctatagccaaattattagaattaatataagtaaatttagcaaatttgctggatacaaggtaaattatatttctgaattccaaacacaagcgattataaaatgaaatttcaaaaccaacattgtttaccatagcatcaaaaatcatcatatacctagtaatatatttaatgaaaaatatacaagactattccgaatacacagagaactttagaacattattgagagaaattaagacctaaataaatgtggggtattccatgttcaagaattaaaaggttcagtgtgataaaaatatcagttctacccaaactgatctatagaatcaatgcattttctatcagactcttagaagatttctttttttgaaaattgactagctaattctaatgttcatatggaaatgcaaaacagcagggcactcttgaaacaaaagagtgaagttggaagacttcactatcagatatcaagacttgcyataaagttatactagtgaaggcaatgtgatattggtaagtaaaaaagaaaaacaccatacagtggaactggataatcaagaaatgtacccgttgatgacattaatttgatttatgataatacaggtaacccttgaatagtgtggaggttagggaagctgacccccatcacagttgaaaatctatgtataatttttgattaccccaaaagcttaactactaatagcctagtgttaattggtagccttctggattacataaacagtcaattaacacaactttgtatgttatatgtaatacatactgtattcttttattattattwttwttttttttttctagacggagtctcgctctgtcacccatgctggagtgcagtggccagtggcgcaatctcagctcactgcaacctccccgtcctgagttcaagtgattctcctgcctcagcctcccgagtatctgggactacaggcgtgtgtcaccatgcctggctaatttttgtatttttagtagagacagggtttcgccatgttggccaggctggtctggaactcctgacctccgttgatccacccacctcggcctctcaaagtgttgggattacaggcgtgagccaccatgcccggcctatatactgcgttgttacaataaagtaagctagagaaaagaaaatgttattaagaaaatcatgaggaagagaaatatatttactactaagtcagtggaagtggatcatcataaaggtctttatcctcatcatcttcacattgagtaggctgaggagaaggagcaggaggaggaggagttgaccttgctgtctctagggtagcaaaaggtgtaagatttggaaggagaggcagccacacttggtataactatggaaatacatcgtaatttttgtgtgttctgctgtatttctctaaaaatgtttctattacagtactgaaccttcttccactatttgctttagtttcagagcccatatcattgaagggtccatgtcataagagtcctttgtggctttttttttttttttttttttttttttttcaraatagggcatttttgtctgcatttaaaacttgttcaggcagatatcctttgtcctcgatgattttcttaatggtatctggaaactcatctgctgccttttggtgggcagaagcttctcatcctattatcttgacttttttaaagccaaaactttccaaaaattatcaaaccatctttatctggcattcaattctccagctttaratccttcaccttcctttggcttcacattgtcatataatgactatactgactttgctttttaaaagtcatattagagtctacatatagatacgcctttctgttaacaatcctgcacccacataaaagatggattttcaataagaggtcaaaggtatttcacaaaacatacaaggttttcacacctgctggcgtagctgcagtgacagcatcacaaattttcttttttcataatggttcttatgctggactcatttatcttgaaatggtrggcaaccacagctgcacacttcagtctatggtacatgtcaagcaattcagcctttttttataatgtcatgacttttctctgcttcttggtaccacttgcagcatcactagtgacacttcgtatgggttccaaggtgtatgataatgtgaattgtatcttgacaaagccattatttaaaaaaaaawawawatatatatatatatatgtatttatatgaatgacccccaggttctctggcttgacaattgggtggattatattgttattttgttatttagtaagatggggaagggttggaatgatgagttcaattttcgatttgttgagtttgagggatttacaggaaatccaaatgaagataatccaggaatcgatctatacatacccagaattcaggagtgaggtctacactgaatatacagatttgtgcctcactatgtactgagtgtccctaatccagaagttcaaaatttgaaattttttgagttctagatttgtaatgctcaaccttgtaagtataatgcaaaccttccaaaccaaaaaaaaaaaaatctgaactctgaaacatttctggtcccagttactttggataagggatacttaacccataacatacaagtggcatttgaaaggagtacatagaacaagaccatgaagacaaagataaataggacagaaaaatgaaagcaaagtctgctaaaggtgatgaaaagatgtagccaaggagagaaagaggaaaatcaggaatatatgatacaatggaagcctgtaaaagattgctttaaagaggatgggagtaatcaattgtgttgaatgctactgacagattaaatcagatgaggaacatattggtaatattggaagaatagtgtgatttacagtagtgcgataaaaataagattgcaattagttgagaaatacgtgggagataaggaattagagatagccaaagtttggatttgaagaggaggaaagattagggagaatgtagggcgaaaatgctctttgttttttttgtcttagggaagcggtgttaagatgaaaaagactttcacttgtagtgctgttgggaatgagccagtggggacagaggttatagatacccagaagataatctatagggtgagatttctgacagtgctgaagggaatctgaacacaagtagggggattgacattaaaaatggggaggaatctcaagaccagcctggccaatatggtgaaacctcatctctactaaaaatacaaaaattagccgggcatggtggcgggcacctgtagtcccagctactcgggaggctgacacaggagaatcgcttgaacccgggaggcggaggttgcagtgagccaagatcgtgccactgcacaccagcctgggcaacagagcgactccatctcaaaaaaaaaaaaaaaaaagaatcatgtttctatgataacaggagtgaagaaggaaaaaggataagtggaagcaaatgtgtttgtaggtttgttggtaagacattaaggaaattctgattgactgcctcctattttctccttgaaataaaagatcaaattacctgttgtgactgagttggtatatttgtggagaagatttgaaatagctgaggaatactgcagagaagaatacaagtgaaatatagtgggactggcagtcattactgaaatccagaggaaatgaataatcttttatggtgatgtcacactgccctaattataagattttttacctgaggagagcaagggattggctaagtctgggctcatgggcaagtctggctcatggcctttttttgtaaataaagtaggttttggacacaaatattgaaactgcctttgcaaaacttatatcagtgagaaaactgtggcagtaggggagatctgatctagccaccaccccctcttgcctttagccttcaagctgccttaattattgctgggctttggccaagctaactttggaagacatttagttaatactctattttttttattttatgtatgtatttgtttatttatttatttatttatttatttatttttgagacagagttttgctccgttgcccaggctgtagtgtagtggcgtgatcttagctcactgcaacctctgcctcccgggttcaagcgattctcctgcctcagcctctcatatagctgggattacaggcgcctgccaccacgcccagctaatttttatattttaagtagagacggagtttcaccatgttggccaggcttgtctcaaactcctgacctcaagtgatccgcctgcctcggcctcccaaagtactgggattacaggggtgagccactgcccccagccatttatagtttaaatgataatagcccttctccaaaactcaaccacctttgtaaagctaatgagagaccaccagactaggaggaggagacaagcctgaattctgctaaaacataggcccagcagtggctcacacctgtaatcccaacactttgggaagccaaggagggtggattgcttgagctcaggagttcgagaccagcctgggcaacatggcaaaaccccatctctaccaaaaatacaaaaattagccagtctcataacctggtctcataaataaataaataaagagacataaatgattgccagccattattccggaggcacaagatatataacttccccaattactcctgcatataacatcacaactgtagaacctgagattggccttttgagatatcttttcaggattttttcatgtctgacaccaggggctccacctggacctgccaactgcccctgtggccccacccagaagtggcttagtgcacaagaggaccattccccacacccttatgattgcacccccaaccaatcaatagcaagcatctattcatcgtctaaccactcccaccccttcccccaaactacctttgaaaaaccccaaacctacaagacttcaaggaggttgattagagtaatattaataaatcccatctcgcacttggcctggccagccttgcatcagttaaactctttactacaatgccatggtttttgtgaattgattttgtttgtgcagcaggcaggaagaacctggtgagcagttacaatatgttcatttgttgtctatgactgctttaacactgcagtgacagagatgagtagttggtcctgaaagcctaaaatatttaccatctgacttttaaagaaagtttgccaacacctggtgtagatcaatttggatataagtacagagaaggcagacatttggggtcacccagggtgaagtcttgacaagtggaaggatgttagcaaaggaattgcagatattggcagttgaccttggtattggtattggaccttgaaatccaagctggagaggaagagaagtagatgaaaggaactgttaggggttccagagtttattcagatttcttgagagtatttggagggggaaaagctgaaaatggtagaagattgtggtcatagataactgaaatgtatgatttcaaagaaggggcaattctaggtagtgacagcgtcctgggtgtggtagctcaggttatacggaactgagaggcagtgctggctacatcatccatgtagatgctgagccccctccccaccagggtgggtggagaggaatatggtgagccacaggcttatattttcttaatttctgggatttattgggaaaacatattttttttcatagaagggaaaagaatgttgtaaatgacaggatttcaaattatcaaggttttttggggtattacattcctatgtttaagttgaattgctaacagtcaatttaaaaatagctaaaaatttaggaaaaagtaaatagaaaatttattgctttgtttttatacttaaaccttatactttttaaatgtcttttgattaccagactgcagatgtatttaattttgaggaaacagtttayagtcatcatatgtstccagtctccaccaagcactgtttggtagcaggtttgtaagtgtattcttttgtcttttgacatactgaaaactttctccctttttatatgtagttagttttgatgtagacattttaacccagaggaatatcacaattttatatatatatatatatatatatatatatatatatatatatatacacacacacacactatatatattcaacagatattgtactatttatattcaacagatattttgcaaggcaagcactatgctgtggccaggattcagagaataagagcgtatttctgtctaaagagttccttttaaaccaccaaagtttcagagattttacatgaataaaatttggcaactttcccaatttgacacaataaaacaaggaaattctttctttctctaagattgtgattcaaattaagcatcaatttatataaaagcacctgcaacaaacatcttcatatataaggaagaaaaaatgattttctggtatcaggtatctgggccctgtgattcattatttctttggcaccatgtgagtctctacctcttttatctgtgaagaagagctaggaactaagttgtcttgaggtcctttcagtctgtgtccagtttctgtgaatctgttactagtgattggaagtatatcattaacttggaaaaactaagctattaaaatacaatgatttgatgtgataaaatggaatagaactgtacatacatacatacacatttaccaatacaaatttcctgggtttgatactgtgttttagttacctcacacataatcgttggggaaacttagtgaagggtacacggttctctttatactagctttgcaactgcttgcaaatctataattatttcagaataaaaaataaatgtaataatagaggtctcttactactaaaatataactgtagttaaaataacttttctaaatgtaaacattaaaaatgacaatgtaattttggcatatatcttcatatttctgcatggatacagtgaaaatgtcatgattactaatgataatgtcttgtttccttttgatgatgacttatgataaaattatcttaaaccggttctgtttttacagttggtactagaggacccaaagtrcaactttgtgacttgaagtctggatcctgttctcacattctacagggtatttttattttatttcaaacggcaactactttgagtaaacgattcaataaaaagaaacgttactaacagtgtattctttgtaagtgacatgactaatgtactttgtgctrgttgttgagactcagcagggaaataaagatccttctgtgcattattcttataaaactgaaccattgaaaacacatttatatgaacaatgatcattggggaagctcaaacaatatgaaaaatagttctaactcaaaaccttgtgttatttctacattaaaaaractaatgcaactcacatcagtgtacttgtctcatatgtattatttaatattctggctaatgagtaaacattgttcttaatatttaggtacattttttctcagtaaaaatattttagaaaaatatattgaagtaattctttggtaaaggtgtatttaaattattcttgctacttttatcagtattagattgtctaattctaaacaatgaaaagatagaatataatttatatattttgactgatctcaaagaaacacataacaaatatgttaagaaaagttgatgagatagatagcattttttgacattattatgaatttttattaatataagctgggcaggtggaaatgtctgatgtgaatagttcagttagctaaaagtgaattaaaatattgaaatcaccctttgaacttatcacctgtgctttctagaaaaaaacattttatataaatgcttttctacaagcatgagttaaagtaggtttctcttataactttatgagaaattggaaaacatttttatcctttaaaatgtttatcttatatgttttattacagtaattgagcttgagttatatggatttactgacataagctaacaactgtatttaaaaagaaagacttacttaactctgttttttccaaagcaaaaccagttcttttacaataaaataccatatgtttgaaatacccctgtaaacttcacattagcattgaaacatcgattattataaatctgaaaaatggtcatatctattcacattgaatatttggcctcactttcttcagaatcaggcaaaattattggcactttatcttctgatttttcagatatcttgcaagacttttcatatagttgtatttgcaggtcacagacaagaaatattagcagtttcctggtctccacgttatgactatatcttggcaacagcaaggtaaaatttaacttatttgcttttgaagttagtaattaataataagcattttgaaaagtctacatttatgtaatgtatatattttagcatatttaattattaattcactcctttaaaatgaagtattgacttagaaattttaattcatgtcaccaaaagaaatcttcctttgtattctaattctaatcctatccaccttcaaggtgtttcaccttagaacacagaggaactgtgttgtgtcattcttacacacaaatgtataacacagtgctaatttttaaatagagcatttttattcattatctttaacctggagttattttgaatttgatgtaacatatccacacattcattgattcaattttctaatatttaatgacttcctcccacgtgccaagcattgtgctagggacacagaggtaaccaaggctttgaaaaaccaacaatctaatgatctaatgaggcatatagtcaaaaatcagtgattacagggcatccagaaaaatgctttaatagaggtacatctctggtaggtgtaatataggaaaagaaarcaggatcacttaactctgagaggatcaaaagatgtggggaggtttattttttgctggagaaaaagagtattgcatatttatctgctggggaaagagtaccagtagagagaaacaggtgaagataagaaatggagggaataattggtgcattaggtccttgaatacacagaagtgggtagtatcaaggatccagatgagggtggagggtacacctagtttggcacatgaagagcactgtgagactaaatggaaagaggaaaaggtggacatgaatacagttaactttgtagctttggcagagaagctcaagaaactcagacttaacggcttctcttggtttttagtggagtagaacttgatgtcatctcttgaaaatataggaatgaggatgcaattttgaggaaagatagtatggatctggaataatagattgaaagagtgagggagctgattaagggcccataggattactgggcacttgctccctgttgaatatgtagagcacagctgtactaagccacagaaattaaaacattaaatgaaagagacttaacaattttcggtgtctacaggaaagtacctaggtgcctgaaaattgtagaagtcatgggtaaaaggaaaaaaatcacaaaaaggcttgtaggagggatcaaggatctaatgaagtagaagtatgagagttagactaagaaaatttaaaaactgaagggataggaagtagtaatcaaatatttttatatattttcataaaactttaagtagaagaagaattattacgaaagctattcatattaattttataaagatctgtgtctggatttttttttaagttgccagccctgtctccctgtcacagttcaggccccaaagaagcttctgttaataactggcagaatgtgatgttgaaatttatgatttctgaagtgcagcaaggtctagaatgtagccataagaaggctagctgaagaggtatgaaggttaggagctaggtgctggttatgcttgggtggattttacatttttcatgcttaacttggttttcatcagataagaggagagctaagaagctttcaattataagaatactccaggaatttgaatcagtaccacaatggacctagtaatcagtgttaaaagttggatatgttcaaatctaatctgtttcagaagagacttaaatcctcatactgatttcatttccttcacctggaaagaaagaaaaccaacttaagaatgggtaatgctagttttttgctaactattccagttggmtaggtttgatggtcatctgtgaaaagaatcgaggttatagaaaccagtaaaccttgtgtgtatatttttttaaaaaawttaaataaaaaataggcttataaaaatgtaatgctctctcttattaaaatggcattgataagccccctgggttacaatattgttgaggtycttgtgaggacatgatagcatcagttgaactgattaggagcacgtcrgattgccaggcatttttctttagaaataatctagaagctgaaatagatgtctgatcatagatttgcctttcttctttttgcttacttgaaagaaaatgaaagtaagtgtctaatttctaggagacattaaatatagttctcatatatctggcaaagattgatttgagtataggaaaccaaatggaaatgcattgtcctcattattcaccttacacttaccgttttttatataaaaaggaaaaaaacaccaaatcataccaaatggattcttgagcaaagtgaaattagttaattgcttgtcttgacagcatttggataacaagcagtagaaaaggtatggtaaggaacttacttggaacaagctacaagcctttctggtccttgggagaaaagatgctcatgtaatttaaaacaatataaaaagcagcaaaattttgttcttgttatctggaaaagaaaggttactttttttttttgctatttactcacttatttgagctactgttgactattgaatatttgctgaaaaggcaaaagttcaacaaccctaatgtatgaatacatatgtacctatataacgagacctctgtgtgccataaaattagaaadgtgggtgaggggtacagtcattgtcctagctacatatgtcaatgtaacatttatttcttctcagtgctgacagtagagtaaaattatgggatgtgagaagagcatcaggatgtttgattactcttgatcaacataatgggaaaaagtcacaagctgttgaatcaggtaaggaagaacgcattaataaatatgacaatgatagtatttttttacattgaaaatttttaattgaagccacataataaacgcatattgacaaattgcaaactttatgatttttcaaaaggcattcatcgtatatcactttcttaatttacataaactaaattatgattctctttctttaagatacaaataaaaatggcagtttcatttgcccccaaattttcaaaagtagaaatttttgtgaattaacttgctttacttgttttgtttttgctccattgaggccaactatacatattcaatgccatttaaaaagtcacaataaattacagaaatagtaacattttgtggccattgtatcaacataaaattgtgttaaatgtgagtcagctgcaatccatgtgacaaagtacctaaactgcatttttacagtagaatttaattcctgtgtagaaattttgatagagaattaattctggaccagaaatatattagaatgaactatataaaacctataattgttttatgtaatttcttaacaactatagttttatgtagtttctacataaaactatataaaacaatcacaaagtttaaaaactatataaaacaatcataggttttatatagttcattctaatatatttcatatattagaatttatatagttttttaaaaaaccttatgaaacatgtaaactatataaaacatgttttatatgtttttaaattaattaggctattttagaattatgctttctcaaacttgttaattttgtaagtgatataaattttgagactacaacagtcatcctttccctgttttttttttcaatggaaaacactagaattattgattttaatagtccatagaatgatttttaggttagcaataaaaatatatgagagatgaaaggcatttaattttaaattttagtgttaagctacacatttaattgaatttcatggcacaatttccttgctggaaaagaaaagtatgttaggcagaaattttttcccttttttttttgttttcctctatttttatggttctgatttatatagcttatcctattcaaataatctgaagggttggttaagtataatctacttacattttttaagtaactcaagtagttgtcctttaatatgtttaattatatcatcaaacattaaatatgtcctgaatacaagaacagataaactgaactatgtttttcattgcagcaaacactgctcataatgggaaagttaatggcttatgttttacaagtgatggacttcacctcctcactgttggtacagataatcgaatgaggctctggaatagttccaatggagaaaacacacttgtaagagatttttaagtatatatttgggtataaattaagaaatggatctgtgacatacacttgatttttttatrtatttaactcatttattcccttttaatcacagctgtttttaaaaatgtgtttctactatgtggactagtaattctcaactcaggacaacccacccttacccactacctaccacattctccctacttagcagagaatcactgttctactgagccactgttctcaatgggagtgcaaagcgtagtagagaaaaataaaagactgaggactactgatataaattaaagatatgaagctaagtaatcaaattttatataggttgagtatccctaatctgaaaatctgaaatctgaaatgttccaaaatctgaaactttttgagtgctagcatgacacacaaaggaagtgctcattggaacatttcagattttgaatattcagattagggatgttcaggcagtaaagcaaatattctaaaatccaaaatacttctagtccaaatcattttggatggggatacttaacctgtactatatatgacttataaacaaaatttacagtgaattttatagtaccagaatatgtagtactttatttaatactactgcaataaatatatttcgaaggtgctatattcttatgtggctattaatttctagtacttgtttttatgtaggttatagtcttatcagatatgcctatggtttaataattttcagaacaaactactaaaagcttataatttggtgatartaataatagctaatatttattgagagcttgtatgtcagatactgtgctaataataattagcatttaatttgccaggcagtattagacagcagttggcaaaacatggaaaagtcctatcctcatggagcttacatttcagcaagagtatgaaaggcatcaatcaattaatagatggacagatggataaattatatattagattaggtaaggactatgaagaaaagcaaagcaaagaaaggatcacaggaaatactgggacgttggagttgctgtttcacatagggaagtcagggtaggcttcactaaggtgacatttggcctgaaggaaatggggaagtggctcatcagttgtttgctgggggatatcattctagtcagggaaagaaaaaaggtacaaagaccctgaggcgagaacttccttgggatacgcaaggaagagctaagaggttcttgcgttggaatatgaagggaataacagatgaggaacagaaggaactagggtgccagatcatatgggccctgcaagcctttgtaaggggtcaggcttttctctgggtgagatggaaagccactaaaggcttgtgagtggagaagtgacaggatcactctggaagagtagctgggcatgtgtgtcaaagtttaatgtgataaatataaatggtactgaatgtatatataaattgttcatgtggttctattccatttttctttccttcttgaaggtgagtctcatgccctttggatttttttctattaagtccgtatctaaaataatgtattgaaaatggataatacattttacagtggacttgatcaaagtaaaagtaattcatgcataggtaactaaggtatcccagaaactgacctacatagaatacttacggttgataccagaaaagattactttaaggggaaacacactgtcttcagatttttaaagggctatcagatagaaccagtcctgccgtttagtaacttcttttttttattttaaagttgacaggccaggcacggtcgctcacacctgtaatcccagcactttgggaggcggaggtgggtggatcacgagrtcaggagatcaagaccatcctggctaacacgatgaaaccccgtctctactaaaaatacaaaaaattagccagtggtgggcacctgtagtcccagctactcgggaggctgacacaggagaatcgcttgaacccgggaggtggaggttgcggtgagccgagatcrcgccattgcactccagcctgggcaacaagagcaaaactccgtctcaaacaaaaaagaaatattaatatgagttcgagaccagcctgaccaacatggagaaaccccatctctactaaaagtacaaaattagccgggcatggtggcgcatgcctgtaattccagctatttgggggctgaggcaggagaatcacttgaacctgggaggcagaggttgcggtgagccgagagcatgccattgcactgcagcctgggcaataagagcgaaaactccgtctcaaaaaagaaaagaaaagaaaagaaatattaatatgacattaagttgtaggatggattggaggaagaaaccctaaggacaagacaaaagttaatgccctggttcaatattcatacctcattcaacactttccagttcatatttgggaaggaatgtggtatactggaaagaccataagttttataactaggtgtcctgagaaacaaatgtgaataaggccatcacagtctagcagtttataatttttccagggggaacagtgaaatactagttgaaaactgttttgtattttttcttcgtcaccccacccccatatcattgtgcaaattgttgcacatgtaggatcagaagacacaaatgagggaatgttayatttttaaacatgtataggaattaatctaggaacttactgaatacctttgtgttccaggtgctttcatatggattatttcatttgctttttcacgatacataactctataagtaaatgatgttatttccgtttaacagataagaagaatgaaacgaagtggttaaatcattattcataaggggcaaaaaaaagatgagtgtttaaaacccaagtccaccaaaatgagtttaatatttaacccactatactgctactgccatgaggtagctaaatgcatgtacccatttctggcacaagttagcctaaagggaaagtaagccaagtatagtatccatagattattagcatgtatccattttgacctcagtgtttttatttatgtatatatatacatacacatacacacacacttatctaacctatagaaaaaaaagtgaatccctttttttttttttttttttgaggtagagtctcgctttgttgcccaggctggagggcagtggcgccatyttggctcactgcagcctccacctcccaggttcaagcaattctctctctcagcctcctgagtagctgggattacaggtacccgccaccaggcctggctaatatttttgtgttttttgcagagatgggatttcaccatcttggccaggctggtgttgaactcctgatcttgtgatccgcctgcctcggcctcccaaactgctgggattacgggagtgagaccacgcccagccgacaaatcactatttaaacttcaatattagccctgacgacagtggattttgttgatatgcatgatcatgattcccaaatgattagttactggttttacactcaccccaagcttatcaaaattattatcaggaagtaaacccatcaacttatttagcccaaagcttctcaaatttgcattagtgtttacctagggattacctagggatcttgttaaaatgaagattattttcggtaggattggggtggggcctggaagtctgcatgtctgactgcttcaggtgatgctcacactgctgagcctgcacactacacctttggagtacaagcaaagaattttaatttttgtcccaaatacataattatttatataaaggtaaaactacagtgtacacactatttatggtctgtgcttttttacacttagcctttatccctgttttctgcataattttcataattatgatttatataaatcataaagttaatgtaacattattaggaatatatacctattctcagttattaccccattctaaataatactggatagaattcctctgggcatatagcttttgctatttaattatttccttaagataaattcccagccgggcgcagtggctcacgcctgtaatcccagcactttgggagatcaaggcaggcagatcacgaggtcaggagatcgagaccatcgtggctcacacagtgaaaccccgtgtctactaaaaatacaaaaaattagccgggcgtggtggcggtcgcctgtagtcccagctactcgggaggctgaggcaggagaatggcgtgaacccgggaggcggagcttgcagtgagcctagatcgcgccactgcactccagcctgggcgacagagcaagactctgtctcaaaaaaaaaaaaaaaaagataaattcccaggagcaattaccaggtcaaggggtaagaatatctttgctgtttaatgggtaaaattttgcaagatgaagagttctagagatggatagtgatgagagttgcacaacaacatgaatgcacttaatgccattgagtaccattaaaaatggttatgatggtaaattttatattatgtgtatgaaaaaatgtttaactataaagggaagggagaagccccgccccctcgtggagactgcccagtgggcggagtcgggcgccgccaggctggcatccggaagccagaagtccggagcctagcagcacaagagcgtctgttactctctcttctcagatccccgccggaagtataggaagagagcaagcggattcgaacctatctgctttcaagctgatcatgatgatgaaacttagaaacaaaaatgaaaagccaggtaaagtttccaagggctgtaagaagcctgcaaaacaaaatgggaagaaagcaacctccaaagtgccctctgctcctcagtttgttcactccaatgatcatgccaatcgagaggctgaaataaagaagagggttgaggagatgagggagaagcagcaagctgcccaggagcaagaaagacaaaaacgcaggtctatcaagagctactgtgaggatatcctaagacgccaggaggagtttcagtgtaaggaagaagttttgcaggaattaaatatgtttcctcagctggatgacgaggccactatgaaggcttattacaaggagtccgtgaggtggtagaatactstgatgtgattctggaagtcctggatgccagagacccattaggctgctgctgctgcttccaaatgggggaggctatcctatgggcagaaggcaacaagaagctggtcctggtcttgaaaaagattgacctggaccccaaggaggttgtgaagtggctggattaccttcggaatgagttgccaactgtggctttcaaggccaggacccagcatcaggtcagctttggagctgaaaacctcatgagggttctggggaactattgctgccttggtgaaatgygcacccacatccatatggacattgtaggccttcccaatattgggaaaagcagcctgattaaaagcctgaagcacagccatgcatgcagtgtgggagccattcctggggtcacgaaattcatgcaggaggtctacctggacaagttcatccggctgctggatgctccagccattgttccagggcccagctcagaggtgggcaccatcctgcataactgcatccacatctagagactggcagaccccatgaccccagtggagaccatcttgcagtgctgcaacctggaggagatttccaactattaccttctctctgggtaccagactactgagcactttctgacagcagtggcccaccatttggggaagaagagagacttacacagtcaggagcaggcagccaaaactgtcctagctgactgggtgagcgggaagatcagcttctatagaccaccaccacccactcacactctgcctgcccatctcagtgctgagaattaaggaaatgaccaagttctttgacatcraggataccgagcaagtcaatgaagacaccatggaatgcttggccactggagaatctgatgagctattgggtgacacagacccactcaaaatggagatcaagttgctccattctccgatgatggaaatagcagatgccattgaagataaagctactgtatataagattggagatctcactggttattgcaccaatccgaatcgtcatcagatggggtgggctaaactcaatgtagaccaccaccctaaaaaaaaacagtaaggtggatgtgtgcccagtggactgctgcccagtactgcagaggatcatggagatggaccccctacaacagggccaggctctagcatcctccctgaagagtaagaatttacagaaatgtgcagataaaatccccagggagctgtctgattccatgatgtctgccctccacctctctggcaatgctgatggcagtgttggtaactaattgactgatctcacttcccttccgatccaagcaccagttccagtgggacgggagattaccagtgaaatagtttggttctccctgaagcatctgcatattaaaagaacccttccccaactatgtgtytttgcctcccactgttctctccactctctccaggaaaaagagtcccaagaggctggagctgacaaacccaataccctttatttaacccctactstgttttacaacagaaataaaagaagtatcagcaggaaaaaaaaaaaaagaatatgcccccccaaaaaatatcattaccccctccccaaaaaataccattcttttgaaaggaatggtttttggggggtattagccccaaaaaaaattcttggtggggtagtcttttgaaaataatgttttttgggagtatataatatacaccccccaaaaaatattattcttttgaaaagaatggttgcattaataaaccatttgcccttttagaaagaatagccaaattacactgccaccaacatgtttacctcacttgtatcactaatgtcttacgtttttttaattttttgctaaatggtctaaaatgattcttcaaggttgaagtctgtattttacttctattaagattgaaaagtaaacatttacccctgtggkkttttactatwtgtatttcctcttttgttaaatgtacattcatgtcattggcccttgttctgtcaacgttgaatattttccttaaatttaaaagagccctttttatagcataatattttaagtatttctcctagkctttgttgtgttttaaattcagatttcagagatgagtaaccttattattttaatcctacaggtgaactatggaaaagtttgtaataacagtaaaaaaggattgaaattcactgtctcctgtggctgcagttcagaatttgtttttgtaccatatggtagcaccattgctgtttatacagtttamtcaggagaacagataactatgcttaagggacattataaaactgttgactgctgtgtatttcagtcaaatttccaggtaagagtgatacasgaatttaaaatgttcagctagctagcttgccagaccagttatatgtaaaagaataaattatgattttattctgaggagttatrcttttaatccacatttgtagtaggatttatttaatagagaatagcacagcctagattgttagacagcatacaatgtatgaatgaatcaatataatactgtgcaacttgattggtataaattctgtttcttttgcatatgaccttcatttatttaacaactgaaaatctgtggtgaattaaaataatttcttgaaacaatcttttgggtaagaaataaaatataggcatttaatcataaaatataatttgtatatgttggtttatgtatgtgtggatgatctattcttccttattttctaccaatggctagtaaagggaggttttgaagttaatacaacctatataatttcttaaatactctggcttttgtttgtttgttttacatccagatcttttcatatcaccaatggagcagatggtttttcattttttcagagaacatttgcacaaattacctcatgcacttctttaaatgagtataacattgcaagatagttggtattttccctgttttgtaggtaaggaaaatgaaactcacgtaagttaaatactgatagaatgaacattacagattattagagctcaaggagactatcactttgaatctcctattcattcattcattaatactgattgcctaatttgtgcctgacactgtgctgtaagatatatagacctgatttttcagccagtacataccattatggcagtattcattattaaaatatataaatatttatatatcctactggctggtaaacagctgctgcaccaagcccccaagcgacctccagcctcagccccttccctgggacctcttagacgtcaccttaacccagcaactaaaaggggacctacaagaccctactccaaccctatagccagtatctctttttattagtcaataagaaggtatatcccatttgttaaacatttttagtgttctgagagaagaaaacgaaagcaccagagaggtgacgtgacttgcccctaacctgcaagtagttactgataaagcatgtgtttgtattcaaagaaattcttaaaacattgtccctcctttctttgcaaagttacttagagacacagccgaaatttcatcccaggtactctaaccacaaattatttctttctaccaaattggagcttctctaataggtgtgcctagaatggattaaaatcgtgacaatggytgcgcacagtggctcatgcctgtaatcccagcactttaggaggccgaaagcatcacttgagcccaggagttccaggccagcctaggtgacagaatgaggccctgtatttacaaaaaatcaaaaaatcagccaggtgtggtggtatatgcctgtagtcccagctgtgcaggaggctgaagcaagagaattgcttgagtccaggagattgagtgagccgtgttcacaccactgcactccaacatgggcaacagaatataaattcatgaatctaggctgggataagtaagtaaattaataaattgaaaatttgatgaggaatgagatatttatataatctcaacatatcaccctacaaaatatgaagtacaaactaaaaagattaattttaccctgaaggagcctggcacatatcaccttcatcgaataatctaagttagcatcccagttatgggacatcacttctgtgatattcctgaccaaattgtatcactcaaatttaatcatgaggaaacataagacaagccaaatgtgaagggcagtctacaaagtaactgctgtatatccaaaaktatcaaagtcagaaaagccaaagagactgaagaactgttccagcttgaaaactaaagagacttgacgactaagtgcagcatgtgatttttaactggtcccttttgctataaaggacagtattggaacaaataatgaaacatgaatgtggtctttagatggtggtaataatatgattttgttggttactttgtaactataaggggaagtacccttgttcacaggaaaaatacactgaattattcaagagtagtaaggcctaatgttggcaacttactctcatatgattcaagggggaaaagaagtcttttggactgcacttgtaacttacattttgagattattttttaagaaaatctaattgcccaaatgaactcctccatctatcacagatacttcaaggcttaatgtaaatcattctatctaagtgttctttgttagtcattctaatttaaatgttgctgctttcaatatctctttcttgaacatctacagaatttcctttatgtcttcactgggtgtgttagtacttattgtgaattgctctataagcttatctgaccaagttatcttgcgcattacctggccttctcaggggagtaaaattactcaagggcactgaacatatatatctttgcatcagccacagttagtgtaactttatagtctagattttgtaatacagtcaacaaaattttgttttatttaggaaatttgataatgtatatctaataattatttaaatctacattttctataaattactatataatcttattttcccttttcccacatccttacttagataaaaaacacaattataccatgcctcacattgtttttgagatgtacaataataaaaataaattgtattaaacagcagaggaaaaaagccaatataacatatttcttcggttttgttggggaggggcatgagcattgttcagccataagcaaacagcatatctgtagacattgacataggctgtgcatcaccccaagcttccccttatgaagtaaacttctcaacaggcatgggatatacatcttcaagctcttctgttgaattgcagccagttaggcagctgtaagttaaataaaactttttgagaacttggcctattttagtagacgctcatatggtttcttcactgaagtctttattgaagctcagttatttggacacagaaagacaaactatttttttctttctctgacattagaaatatatggatactataattgataaaactgctaggatttggggtgtgtttgtaaaattttcacaccattagtaagctctgacaaatcctaatactatttttaaatacaaaacaaagctttactaacaaagaaacaaaggaaaaacagcattggcctagtttctttagggagtagaaatagcattaatctaattattatgacctaattatttcaaaaatgatataattcatttcagtttgatatcagctcttgatccacagtatcatctttgccttctatgttataggaactttatagtggtagcagagactgcaacattctggcttgggttccatccttatatgaaccagttcctgatgatgatgaggtaaatattattttcacaaatggtacagtgacttctaaagcttaagaaataatgttttgttactttatgtgagagagacttttaaagcatttcttgccagtggcatgcacctatagtcccaggtacctgggagactgaggcaagatgatcacttgagcccagaaatcaagaccagcctgggcaatgtagtgaraccccatctcagaacaacaacaacaaaaaagcatttcttggtaatttccgtaaaaataatttgactattttaatacatttggaaaattcagaaaaatatcaaaagaagaacataaaattcctcaagtcaaattaatcaatattaacattttgatttgtttcataactgttttttcctatgcatatgttttttaacatagttcatatcatggttggacattcaacttggtatctcacttttctcattaacattgtacaataagccttttttcatgtcattaataactatgtgtaaacatttctaatgatattctgtcattgataaaagcaattcaaatatttacctacttggaggcatttctgttgattattgtaaacatcaaggtaaatatctgttcaaaaattgttaatatttctgactatgtctttagatagattcctaaaagtggaattatctcttaaattattatatatcactttttttcttttcttttctttttctatttttatttttatttttatttttatttttatttttatttttatttttttgagatggagtctcactctgtcgcccaggctggagtgcagtggcgtgatctcggctcactgcaacttttgcctcctgggttcaagcaattatcctgcctcagcctcccaagtagttgggattacaggtacccgccaccacgcctggctaatttttgtatttttagtagagacgtggtctcaccatgtttgtcaggctggtcttcarctcctgacctcaagtgatccacctgccttggcctcccaaagtgctgggattacacgcatgagccactacccctagccgacatttttaagactttgttctcaygtcaaattttaccagtttacactcctaccagcagtctgacagtgcctttcgtagaacataaatcagtataagcatgacagtgtaaataaagaccttaaaaacacagtaggtaaacaaagatgaacaagaccattgtccctgacctaaagtaatagcctctgtatttttttttaactttcacatcaagcagtaggaagatagaggctgtttaaaggtggtttctctcccaccaaggtttattctcctaataatcatcctcatttatcttaatttctacaatataaaaagtctaaaagcaatgtctaaaaacaatgtttgtatatatatacatatatatatacatatagttctttaagttggaaatataaataatgtagttggaaacaccttaaggtaatcttaaccaagtcatagtaaaagcatcttaaatggaggtggaggaaaagttattgatagagcacgtttgacattcaaaaaacatttttcatatactgtgtttagttcctttatgaaaaaaggactatgtcaaaaaccacatgaaaatataatttgtatagaggtggttgatagcatctcacagctattgacaatatatatttcatacctaaattttcaactgctaaggtttactgctgtgtaaacctgtgaattattttcttttgtccttaatccaaataaagagaaaaaaataccttttgataaatctttaagtagctacccartgccatatgcatacttccagattttatcacgtctaattkggtttattgtggcttgattaactttagcatacagctgcttttggtgtcagaatattcttctgtataaagcttaatatggtcaaataattaggtttagccatttattttacatttctttatgtaattattgtgtcctgctctttgggaattgctgtatacattaaacccaagttaacactgtaagccatgttaggaaatataacattttatttaccaaatgaaaacagtaaaaataaatgaaaagtaaatctatagtgacttatgtatagaaaaggatgttagaagaatactaaattgtttaattcttaaagataatatgtggccagttgtggtggctcacatctgtaatcccagcactttgagaggctgaggtgggagaatctcttgagtccaggagttcaagaccagcctacgcaacatagaaagaccccatctctacaaaaaatagacaaaattagccaggtttggtggctttacacttatagttccagctacttaagagggtgaggtgggaggatcactgagcccaagagttcaaggctacagtgagccacaattgcaccactatactccagcctgggtgacagagtgagatcttgactcaaaggaaaaaaaaaaagataatatgtgactgatggtttatttccttgttatgtcgttatagtgatagtttgaactcttcgtgtaaacaaacttttgtatatgagaaattaagcaaaacaagttagaaaatcacatagagatatacaaatatcaagttgagttttgtatttgttttagagctataaaaccttaccttttaaaatgtcatgttcatatattttaagatagcagtcattctcatattaatataaaatggtatgtgctaaagtaatttccataaaattttagtttgaagcattcctgtgaatataggcagaacatgaatgtgatcatgatgcagatcccagtagaatagtctgtccagaagatcctattccttacatgtatgtttataatttaagccatgtttaaaagtgcttttatcccaactacaaaataagtatatttatttgatatttatttcccaaggaggcagtataccacactagaaaacaaaaaaaaaaaaaaacacatacacacatatacatacacatagtctttttttttttttttttttgagaaggagtctggctctgtcacccaggctggagtgcagtggcacaatctcggttcactgcaagctccgcctcctgggttcacgccattctcctgcctcagcctcccgagtagctgggactacaggcgcccaccaccacgcccagctaattttttgtatttttagtagagatggggtttcacaattcacaggatggtctcgatctcctgacctcatgatccacccgcctcggcctcccaaagtcctgggattacaggcttgagccaccaccctcagcccacatacttagtctttagcttcaggaaactgggtttgaatcccagttctgccatttattctacttatgatctgggacaagcttataatatttccaaatatcagaattgtctaatcaaagttattcttaggtttcctttcaaatgcattcttcagatgagagttacctccccatcaatcaagatgtaatcccttaggggtgtttctcctgatatccaaagtagaagatgaatttaattctatctaaagaaaggaagaacactggatgatagggacaggatttatggtctttaactataaatccttttatttagttggcagactgttttattatattttgaggaatctggcttccttttgaccctcctttctaaaagctggtctggtcaagacaagcctatctataactcctaattactttttcctgcctgagatctatagggcaggtttattccagtttaaacctgacctctcactaagaatcttactttgttttgacattcacacaatacataactgttttacatatcacttgtgtcaatgtataatcacttgctgacaacctgagagttgccactaattaccagtcagaaatttgaaagttatcaagaaatatccttgtagatgttaagtttggttctattccttctctaaactcataactaggtcccctctaaactcatgcttcattatttctataacattgacrctatctgtcagtagaaytgacaacctggtgagatatagatgaatatgttcaagcacagactgcatgtccactaggaggagatgttgcagagaaaactgaaataatagtagtgacacttgatcagtgggtctcaaatggtaatgtgtaccacatccatctacaacatttttactgctgctttatcatactaccagtataatatttatttgtgattgttttggcaataaaatgtatttctaaaatactgtaatgcattcatatatcattatttcactgaaaagtgaaataatttgtatgcaactgattatgattttcatttatttttgtttctttgcttaccatacaaaaataatttatgatgaagtataattttgcttttctgttgagttttcaactgaaattaaaatttttaataggttacacactgggcttccatagtaggattaggaagcatggccctcatgtggcttatccacctacagacrtgtgtgtgtgtgtgtgtgtgtgtgtgtgtgtgtgttttcccagggctatttttggtagttatcaaaggcaagttaaaggcttctagagacagagtagggaagaggagtcagctaacccccaatgacaagatgtcttttaataaactctcactaaataacctaatttaatagtcaaattgacaacccaaaaagacaggaaattcagtaaacatttggatgaaagacaaaatgaacagacttcagtatacaactgttgcaaataagtgtaccgtggctagaaatcagtgagtagttacctgaggtttaataatagtttcgtgcccaggagtggtggctcacgcctgtaatcccagcactttgggaggccaaggctggcagatcacaagatctggagttcaagaccagcctagccaatatggtgaaaccccatctctactaaaaatacaaaaattcgccggtggcatgcgcctgtagtcacagctacttaggaagctgaggcagaagactcacttgaacctggggggcagaggttgcagagagccaagatcatgccactgcactccagcctgggtgacagagcaagactccatctcaaataataataataatagtttcgcttctggacatttggagtatagctgacattaagtttaataatgtaatctgtttaacaataaagaatgcctaaattaatatattgttttccagctcttctagctgatacttggaaaatgtactaggaacacgtaactttttctactgttttcattgattgaattctaagattcaaagttatcatattcatcaaaaggaaaatgaacattctcagacatgcagtaggggttaccattaaaaaatgtttctaagccgggcgcagtggctcacgcctgtaatcccagcactctgggaggctgaggtaggcagatcacgagatcaggagatcgagatcatcctggctaacacggtgaaaccccgtctctactaaaaatacaaaamactaggtggagccaagatggccgaataggaacagctccagtctgcagctcccagcgtgagcaatgcagaagacaggtgatttatgcatttccaactgaggtaccaggttcatctcactggggagtgtcggacagtgggtgcagsacagtgggtgcascgcactgagcatgagccaaagcagggtgaggcatcgcctcacctgggaagcacaaggggtcagggaattccctttcttagtcacagaaaggggtgacagacggcacctggaaaatcgggtcactcccaccctaatactgcacttttccaatgstcttagcaaacagcacaccaggagattatatcctgcgcctggctcggagggtccgacgcccacagagcctcgcccattgctagcacagcagtctgagatcaaactgcaaggcggcagccaggctgggggaggggcgcccgccattgctgaggcttgagtaggtaaacaaagcggctgggaagatcaaactgggtggagcccaccacagctcaaggaggcctgccggcctctgtagacttcacctstgggggcacggcatagccaaacaaaaggcagcagaaacctctgcagacttaaatgtccctgtctgacagctttgaagagaatagtggttctcccagcacgcagctggagatctgagaacagacagactgcctcctcaagtgggtccctgatgccgagtagcctaactgtgaggcaccccccagtaggggcasactgacacctcacagagccaggtgcacctctgagacaaaactcccagaggaacgatcagctagcaacatttgctattcaccaatatccactgttctgcagyctctgagctgatagccaggcaaacggtctggaggggacctccagcaaacttcaacagacctgttgctgagggtcctgactgttagaaggaaaactaacaagcagaaaggacatccacaccaaaaccccatctgtacgtcaccatcatcaaagaccaaaggtagataaaaccacaaagatggggaaaaaacagagcagaaaaactggaaactctaaaagtcagagcacctctcctcctccaaaggaacgcagctcctcaccagcaacagaacaaactggatggagaatgacattgacgagttgagaaaaaagggcttcagacgatcaaactactccgggctaaaggaggaagtttgaacccatggcaaagaagttaaaaaccttgaaaaaaaattagacaaatggctaactagaataaccaatgcagacaagtccttwaacgacctgatggagctgaaaaccatggcacgagaactacgtgatgaatgttcaagcctcagtagctgatttgatcaactggaagaaagggtatcagtgatggaagatcaaatgaatgaaatgaagtgagaagagaagtttagagaaaaaagaataaaaagaaatgaacaaagcctccaagaaatatgggactatgtgaaaagaccaaatctacatctgattggtgtacctgaaagtgacggggagaatggaaccaagttggaaaacactctgcaggatattatccaggagaacttccccaatctagcaagtcagrccaacattcaaattcagaaaaacagagaatgccacaaagatactcctcgagaagagcaactccaagacacataattgtcagattcactaaagctgaaatgaaggaaaaaatgttaagggcagccagagagaaaggtcgggttacccacaaacggaaccccatcagactaacagcagatctcttggcagaaactctacaagccagaagagagtgggggccaatattcaacattcttaaagagaagaattttcaacccagaatttcatatccagccaaactaagcttcgtaagtgaaggagaaataaaatccttcacagacaagcaaatgctgagagattttgtcaccaccaggcctgccctaaaagagctcctgaaggaagcactaaacatggaaaggaacaaccggtaccagccactgcaaaaacatgccaaattgtaaagaccatcaaggctaggaagaaactgcatcaactaacgagcaaaataaccagctaatgtcatmatgacaggatcaaattcacacataacaatattaaccttaaatgtaaatgggctaactgctccaattaaaagacacagactggcaaattggataaagagtcaagacccatcagtgtgctgtattcaggaaacccatctcacgtggagagacacacataggctgaaaataaagggatggaggaagatctaccaagcaaatggaaaacaaaaaaaggcagaggttgtaatcctagtctctgataaaacagactttaaaccaacaaagatcaaaagagacaaggccattacataatggtaaagggatcaattcaacaagaagagctaactatcctaaatatatatgcacccaatacaggagcacccagattcataaaacaagtccttagagacctaaaaagagacttagactcccacacaataataatgggagactttaacaccccactgtcaacattagacagatcaacaagacagaaagttaacaaggatatccaggaattgaactcagctctgcaccaagcagacctaatagacatctacagaactctccaccccaaatcaacagagtatacattcttttcagcaccacaccacacctattccaaaattgaccacatagttggaagtaaagctctcctcagcaaatgtaaaagaacagaaattatagcaaacggtctttcagaccccagtgcaatcaaactakaactcaggattaagaaactcactcaaaaccgctcaactacatggaaactgaacaacctcctcctgaatgactactgggtacataacgaaatgaaggcagaaataaagatgttctttgaaaccaacgagaccaaagacacaacataccagaatctctgagacacattcaaagcagtgtgtagagggcaatttatagcactaaatgcccacaagagaaagcaggaaagatctaaaatggacaccctaacatcacaattraaagaactagagaagcaagagcaaacacattcaaaagctagcagaaggtaagaaataactaaggtcagagcagaactgaaggaaatagagacacaaaaaacccttcaaaaaatcartgaatccaggagctggtttttgtaaaagatcaacaaaattgatagaccactagcaagagtaataaagaagaaaagagagcagaatcaaatagacgcaaaaaaaatgataaaggggatatcaccaccaatcccacagaaatacaaactaccatcagaatactataaacacctmtatgcaaataaactagaaaatctagaagaaatggataaattcctggacacatacaccctcccaagactaaacgaggaagaagttgaatctctgaatagaccaataacaggctctgaaattgaggcaatcattgatagcttaccaaccaaaaaaagtccaggaccagatggattgacagccgaattctaccagaggtacaaggaggagctggtaccattccttctgaaactattccaatcaatagaaaaagagggaatcctccctaactcatttgatgaggtcagcatcatcmtgataccaaagcctggcagagacacaacaaaaaaagagaattttacaccaatatctctgatgagcatcaatgcaaaaatccttaataaaatactggcaaactgaatccagcagcacatcaaaaagcttatccaccatgaacaagtgggcttcatccctgggatgcaaggctagttcaacatacacaaatcaataaacgtaatcgagcatataaacagaaccaatgacaaaaaccaaatgattatctcaatagatgcagaaaaggcgtttgacaaaattcaacaaccttcatgctaaaaactctcaataaattaggtattgatgggacgtatctcaaaataacaagagctatctatgacaaacccacagccaatatcatactgaatgggcaaaaactggaagcattccctttgaaaacaggcacaagacagggatgccctctctcaccactcctattcaacatagtgttggaagttctgtccagggcaatcaggcaggaaaaggaaataaagggtattcagttaggaaaagaggaagtcaaattgtccctgtttgcagatgacatgactgtatatctagaaaaccccattgtctcagcccaaaatctccttaagctgataagcaacttcagcaaagtctcaggatacaaaatcaatgtgcaaaaatcacaagcattcttatacaccaataacagacaaacagccaaatcacgagtgaacttccattcacaattgcttcaaagagattaaaatacctaggaatccaacttacaagggatgtgaaggacctcttcaaggagatctacaaaccactgctcaaggaaataaaagaggatacaaacaaatggaagaacattccatgctcatgggtaggaagaatcaatattgtgaaaatggccatgctgcccaaggtaatttatagattcaatgccatccccatcaagctaccaatgactttcttcacagaattggaaaaaactaaagttcatgtggaaccaaaaaagagcccgcattgccaagtcaatcctaagccaaaagaacaaagctggaggcatcacactacctgacttcaaactatactacaaggctacagtaaccaaaacagcacggtactggtaccaaaacagagatatagaccaatggaacagagcagagccctcagaagtaatgctgcatatctacaaccatctgatctttgacaaacttgacaaaaacaagaaatggagaaaggattccctatttagtaaatggtgctgggataactggctagccatacttagaaagctgaaactggatcccttccttacaccttatacaaaaatcaattcaagatggattaagacttaaatgttagacctaaaaccataaaaaccccagaagaaaacctaggcattaccattcaggacataggcatgggcaaggacttcatgtctaaaacaccaaaagcaatggcaacmaaagccaaaattgacaaatgggatctaattaaactaaagagcttctgcacagcaaaagaaactaccatcagagtgaacaagcaacctacagaatgggagaaaatttttgcaatctactcatctaacaaagggctaatatccagaacctacaatggactcaaacaaatttacaagaaaaaaacaaacaaccccatcaaaaagtggacgaaggatatgaacaaacacttctcaaaagaagacatttatgcagccaaaagacacatgaaaaaatgctcatcatcactggccatcagagaaatgcaaatcaaaaccacaatgagataccatctcacaccagttagaatggtgatcattaaaaagtcagggaacaacaggtgctggagaggatgtggagaaataggaacagttttacactgttggtgggactgtcaactagttcaaccattgtggaagtccatgtaggaattccccaggtatctagaactagaaataccatttgacccagccatcccattactgggtatatacccaaaggattataaaacatgctgctataaagacacatgcacacgtatgtttattgcggcactattcacaacaggaaagacttggaaccaacccaaatgtccatcagtgatagactggattaagaaaatgtggcacatatataccatggaatactatgcagccataaaaaatgatgagttcatgtcctctgcagggacatggatgaagctggaaaccatcattctcaacaaactattgcaaggacaaaaacccaaacaccgccaagttctcactcataggtgggaattgaacagtaagaacacttsgacacaggaaggggaacatcacacaccgggacctgttgtggggtgggggtaggggggagggatagcattaggagatatacctaatgttaaatgggtgcagcacaccaacatggcacatgtatacatatgtgacaaacctgcacgttgtgcacatgtaccctaaaacttacagtataataaaaaaaagaaaaaataaataaattaaaatataaaaaattatccaggcgtggtggcaggcgtctgtagtcccagcttcttgggaggctgaggcaggacaatggcgtgaacccgggaggcggagcttgcagtgagcggagatcgcgccactgcactccagcccgggcgacagtgtgagattctgtctcaaaaggaaaaaaaaaatttctctaagttataaaaggcaataaatctaaaataatttaagagtagtcttgatgctaatacagcattggaattggaatctgaataaaattgtagtagttgtaaaagttgcacaaaaagaagcaaacctggctcataatacccaattactttaacaatgagaccatcttaaagcccttttagttatttgcatgagtatcagaagtagctattcagaagttttccccaaaatgaactgatttgaaataccacagatgattaaaatttctgtagttgctaatcaccttgttgttttaaataaacatcatctagatgcatgttatccttcagacaaatccctgagggaaacctatgtgctgactataaacgtgttaccatttctgacgtattttgcatgttttactgaactgccctaccaacctataaaaataagtaattaaatatcactgcttacaaataagtacataaatatcactacttaataacccacattatttttggactaaaaatggtattattcagcttgaataccttattctccatatttggtatttgtttatttataaaagttattttcatccaaacaataaagagttgccaccattgatattttgggctgtcaggtcagactgtacacctggagtccagtcttagcctatggatatcagagtgccactttctccaggtaattccaaagagttgttgagaaataccttgagcaatggcagcatcatagtatatgtatgtatgtgtgtatgtatgtatttgtgaagtgattaaaggaaacagggtgtttggataaagtctggtgttgtctgtttcaaatgaagttacattatcttatattgtatatgggttgtttcttatttttgttctgaaattaacagttatacattttcttccaaaataatgtaattgctrtttatctgatatatttcataactttattgtgagcctaaaattatgargtagaaaaaacagaatcttcctttttctttatcttttttttttttagactacaacaaaatcacaattaaatccggcctttgaagatgcctggagcagcagtgatgaagaaggatgaatatcatctttagtacctttttgtctctgctgaaaytttttaaatgagactgtgtttttttcaactgtatggtctattcctgacagctaaattagccctaaatgygggtaatatttttcctcatgttttaaaatgaggttaatatttgcataaaatcctaaaacagacttctgtatagtttatttagtcaaaatgtgttccttgatcccagatgttgtggcctgggaaagccctcattgctacagtacaagtaacacaagtcgttgtacctcagttgtgascttcagcagattttatgaactataagatgcagtctcagaggatcagcaagtggaggccatcagtattgactttctcttacttgctgtactatcagcctgctcgtttccacctttaagaatgattttgccaagaatgattatatcaaaaatagtagttgaaatggtaacatcaaaattattttattctttcttcttcatgtattcacatttttcagtggtttcatttaattaaccatgctttatgttaaacattttggggctcaatgtctcctactatccaaaatgtgcatcacaggaggcttttaactttgtgaaaatcccatgtttgctttattttattttaatgtcagaaggcagtttgcgctaatgcttgaactctttttctgtgaaactcattaaggtatgaccaaatcctgcctcattaattcaagcagaaaatatcctggcagggaatctggcttaaacatgaaatgctgtaataaaatttctatgttattgtctccgtctgtgtcaacccacacgtgattatcatgaaggtaatcttaattttcccttcctgatccttaccagcagtagactagtaaatgaggcttttatgagcttgaataccaaaagtaaacagttgttgagggttttttgtttttttgtttttttcctgagatggagtttcactctgtcgctcaggccggagtgcagtgttttgatctcagctcactgcaaccttcacctcccaggttcaagcaattctcctgcctcagcctcctgagtagctgggattacaggctcccgccactgcgcccggttaatttttttgtattttcagtagagatggggtttcaccatgttggccaggctggttgcgaactgctgacctcaaatgatccacccgcctcggcctctcaaagtgctggaattataagcttgagccactgcacccagccagttgttgagtttttaagtgtataagggttagacctcctatcagacctttccagctaaatgttttccaaacacttgcttttacaattgatttttttttccaattgacagataaaattgtatgtatttaccatgtacaacatactgttttgaagcatatatacattatagaatgactaaatctagctaactgacatatgcctcacatggttaccattttgtggtaagaacactttacatccattctcttatttttcaaaattaatagtaatcttgtaattgtaactatagttactatgttgtgcaataggtctcttgcactaattccccctttttaactgaaattttgtatcctttgaccaatgtttctccaacaaccctagctcctggtaaccaccattctactctctacttctatgagatcagctgtttgtgtatatgtactacattttctttatccattcaaccattgacagatgcttaggttgataccatatcctggctattgtgaataatgctgcagtgaacctggtagtgcagatatctctttgacatactgatttcatatcctttggatataagcccagtattaggattgctggatcatatgtagttctatttttaactttttgcagaaactccatactgtcttccataatggctgtactaatttacattcctaccaagaatatgcaagaattcctttttcttcacaataatgcaagaaatcctttttcttcacatccttgccaacacttgttatcttttgtgttattgatagtagccattctaacaggtgttaggtggtatctcgttgttttaatttgcatttccctggtgactgctgatgttgataattttttcatatatctgctggccatttgcatgtcttcttttgagaactgtcttttcaggttctttgcccatttttaaatgggttgttttcctgctattgagttccttatgtattttggatattaaccccctatcagatctatagttaatattttttctccattctgtaggttgtctcttcaccctattaattgtttccttggctgtgcagaagctttttagtttcatgtaatttcatttctgtacttgtgcttttgttactgtgcttttgagatcgtatccaaaaaaatcattgcccagaccaatgtcatggagcattttctccatgttttcttctgatagtttcaaatcattgatttattaagcccaggccattctactttcaatcttgtccccttggtgaggatgcatttgacctttgaaaaagctagtttgaaaaagctattggccgggcacggtggttgtaatcctaacactttgtgagctgagacaggcagatcacttgagctcaggagttcaagaccagcctgggcaacatggcaaaacctcgtctctaaataaaaaatacaaaaattaaccaagtgtgttgtgcacacctgtagtcccagctacttgggagactcaggctggggaatcacttgaacctgtaaagtcacggctgcattgagccaagatcgtgtcactacactccagcctgggtgacatggcgagaccttgtgtctcccaaaagaaaaagaaaagaaaagctattaaaattggaaatttatttttaagaaaaaggaagtctgcttccaaactgcaagtaactgttttacttacttctagttatatagatatataggctcattataaataattcaaacaacataaaaatctaaaaaggaaggtagtggtcacctggaattataataccataaggtaaccaccactaacattttcatggtcattcttcatgaatctcttatgatacatataattttacataatgggatgttcaacaagctgttgttataaacacccctctctttccacattagtaccacattccccagtccttacccctgctgccacaaaccaagttattaacctagactgtgttctttcatattgcaatcctatatatatctatgcagacatataggggatgtatttttattttgcagaactgggatatacaaagtttttaaattatattttgcagttacagcttatataaatccctctctgtcatttgttataacaaagttattctttttgttaactgcatcatactgcattttgtgaatgtcccccagttgttttcagctggtcccctgttcaaggctacatgtttattagtgaagactgggaactgtactatatttttcttggtatattttggtgtacaatttgtacaatttagttgttgaatatcatcttttttttcccctctgaaatgatagtttagctgggtatacgatttttgggttgtagtccttttgttttgttggtctatagatattgtgcccacttttttctagcttctggtattgcagttgagaattccaaagccactttggttttttttccctttgtagggaattcattcgttacagctggaagcttgtaaactgaggtttaaaagaaaaaagtaaaaacttacagtttcttaatctcgtcaagaaatctgatgtctttttttattctcttccgtcacttcttagacttcttgggagctctttcaatgaaggtccaaaccttttctcagctcaggtatattttcttctaatatttgtctaattgttgcttctcctttttccttcttcttttttggattatctaaaaattgcatgtaactgacctctctatgtttcttcctttcttcccttttttttttttgagacaaaatctcattctgtcacccagactagagggcagtggcgccatctcagctcactgcaacctccgcttcccaggttcaagcaattttcctgcctcagcctcccaagcagctgggattacaggtgcccaccaccacgcctggctaatttttttttttttttttttttttttttttttagcagaggtggggtttcaccatgttggccaggctggtcttgaactcctgggctctagtgatccaccagcctcggcctcccaaagtgctgggatttacaggcgtgagccaccgtgccgggcctgacttcgacttctctttcattgtcttatcttttcgtttctccttgccctttttgttttgttttgtttcaattcttagaactgtagttggcatgtagtaggtgcttaataattacttgttttgttgtttctgtcctatactttgagagtttgtgtttgatattcaaggttactaattcaggcctgactgtgataattaggggagacttttgattattgttttattcccctccccaccctaaacccttgttttgttttgttttgttttgttaagcacttgcaaaaatatagtggagaaatatgggaggcttccacttgaaactttttaataattgtttattcaactggtatttgtcaacccttattcacattgtatatcaatgaatctattatgaaggcagcgatcatgtataacttctctccagtgccttgtacattttatatgttttcctttcacgctgtcttggctgtcctttcgtcacctaaggtacttatattctgccatatttcaaagaatacttaggccatttgttcacttcactttgattccatttttaactagtcattatggtacacctatgaaatgcctagttttaaaaaaatatgtagaaataataaatgcacattttattaacatagccataaatctatttttaaccagaagcctaaaaaatcacatcgtagatcagcttgacctctcttttaaacttgctaccatgcctttactttagaattaagggaacaccttaatagagaaaaaaagttatcccatgaactgaagtgttccttgtgtccagtttatactaaaaagccccatttaaaatagattttaaaacctttaaaaaattctctaaagacaaaaccttaaactgtaccaattataataatagataaagtaatttcaaaacgaagctcttcagtaagagacacataggtttgtagagctcagtattggtgagagacacaccattagctttattatttaaaatcgaaatgagacagtggtagaaaaatattgcatcagcaaactaatctcaattatttttcaaagcaaaatcactatttcacaatggaaaggaaaacctcaaattaggtacttaaataagggctacacagttttcattcagaaatatttcattactgttgagtaatatactaatactttgttatttctataaaaatgatataactactgaagactagagaagctaaagacgtttctgtgaattctataatttttataaacaaatactttggtaaatttccatttttttaatttaatgttttccatgttcaggtgctaattattgagcccgaactaaaaaacttatcactaaagcagtaaacttaaaatcactctaactatgccagaaatggaatggcaagcctagcacaattagaatattgcctgtcgaaaaatatagcagggaaagctaattacagaaaggaaaacaatcactttgctttctattgtaatgaatttctggacatcggaaggttaaatctagggctcaggatagtgctagttcttctgttttaattctggaaaagtattaaattcagggaagaaaactaacgaagtttaatcataaacattttttcttctttgcaaagaatatgtgtgtagttcttaatgtgctacctagaatcactgttgtaaacctcctgggtgcttagaattattacaaatcatttattataatacaaatttttctatcttgctagctctatcagcaacatcctcagatacagaaggcatacttcttttgctgccatgtggcttcttgttttttgtttttattaaaagtaatcacaaaaactgcaattacttttgcaccaacctaataattagacaattaaaatttcaaaggaagggggtaaaattaaagaactatgttgcgacctctcttagttctctgtgtgtaggacttttcaggtgcccaatgtcctcttgactgaccactcctcatgaagatactggtaaactttgtgctagtggattgataaccgctctccgagttcatgctcttctgaggtctagaaagaaatgggtgtctctgtcccaacctggttagttattctgtctctaaaaacacaattaagtcaatgttaagactaagttcattaagctgctcgtgtttttatgccttgacagtttgttaatggtggttgcataagttttacagaactagtttcgtcttgttgcccaggctggagggcaatggtgtgacctcagctcaccgcaacctccgcctcctgggttcaagcgattctcctgcctcagcctcccaagtagctgggattacaggcatgcgccaccatgcctggcttattttgtatttttcgtagagacagggtttctccatgttggtctggctggtctcgaactcctgacctcaggtgatctgcccgccttgacctcccaaagtgcagggattacaggcatgagccaccgcggccagcctgtagtcagctctttaaggcaacaatttattggctcaggtgactggcacaagccacttttcttttg

SEQ ID NO: 97077 - DNA, 79231 bp, Homo sapiens
cagctactcaggaggctgaggcaggaaaattgcttggaggcataggttgcagtgagccaagaccacgccattgtactccagcctgggaaacaaagccagactttttctcaaaaaaaaaaaaaaaaaaaaaaaaagaatattttggcattcaaaaaaaatttcaccttgccccagcagctcagctgactcccgccccatgacacacatgtctaaaaagttgtgctgtgagtttctgaaatacattttaaaatagaattcatttaattatgaaaatgcaaacataaaatgaatttgtatctgttttagtcaagtaaaattagcgttaaatcaattaataaatggttaacatgttctacaatatgaaaaccatacccagttgcctcttcttctaattcatcatttttctttcttattcgattcacattatacttcagtgatgatattaactcaaaaagttttcttaattcttcattttcttttttaggcttaaaaaaagtgtttaaaattatttttgtaaaatctgtagaccctcttttatctcaaacatattatttctcataagtggatgagtaatatgtatttaggcaggtgtataaagtgcattttataaacctgatgccaataaggtcagatttcaataatagtcacttttcttaaaactgctaaaaatgattcaaattttcatcattatcttttctgaaatttaaactgccaacaatgttcgttacaaatgagggtttttacacaaaaaatactaagtgttagttaaaaaaaaaaaagagtagttatatttacattttagtttttaaagatgctctagaaatattgtttttaatagtttaagatattccaagttttcttaaattatatcttactaagacaaattttagaaaactcttatctagttcccattacatttttcatcctcatctgtcttcaggctgagctaaacactgtcattctaagtattcacccataggtttcagtttttccctttctcttaaccatttctctttaaataaagtttattttttctataataaacaaaaacaacttttgtctactttttgtggcttttctattatcctgtttctccccttccattggactctatgacacatggtctcattcagaaatattttttcatcaattattgtgttttttatactgaaatctgatttttaataattccaataaaaaagtccaagggtcatgaaggactttatcctactttactcagcagagcagtgaccaaatgctccctctgctcctctgaccccgcctcctttctaaatgcagcgacctctgttcttcagccctatctctattcctctgaccccacttcatttctaaatttagcaacctctgttcttcagccctatccttttctggttttttgttttgtttttgttttctgttttgagatggagtctcccactgtcacccaggttggtgtgcagtggcatgatctcggctcaccgcaacctccacctcctggattcaagcgattctcctgcctcagcctcccaagtagctaggattacaggcatatgctaccacgcccagctaattttctgtatttttagtagagacggggtttcactatgttggtcagattggtcttgaactcctgacctcatgatctgcctgccttggcctcccaaagtgctgggattacgggtgtggccaccacacccggcagctatttcactttttaaattctctcaggactcctaaaatctcctaaacttttacctagattccctaatctacatttctagctctgacctttttcttgaggtctcttccttctagaacacatattatagacaatattctccaccacatgctcatacattgctacttggtgcagattacttttgtagatagtgaatcttgtctattttatgttggttcttattgatgttactttgagtatactgttattttctaatctcaaagggggactatctcactgttacgatactaaccagtatactttgtcctttttttcattctttcttcttttttggaccagtatactttgtccctttcttttctttttttgaggtggagtcacactgtgtcatccaggctggagtgcagtggtgccatctcagcttactgcaacttctacctcctgggttcaagtgatgctcctgcctctgcctctcaagtagctgggactacaggtgcacaccaccacgcctggctaatttttgtattttcagtagagacagggtttcaccatgttggccagactgcttttgaactcctgacctcaggtaatccacccccctcagcctcccaaagtgttgggattacagatgtgagccatggaacccagccctctttttctttgataatgaaaaccttcccatgagaatcagattatcaattgtttgcctttattttcttttaaagaatttcctttcccatagacatatggcatgatgaacatcttgttctaaagttccttttgggggacacttaactatgtcattgggaggcttcagtaagtagagatctcccttcttcccattcaagattcttcatctcaaaatggtgtctaccaaatgtcttaatccaggtagtcctttgcttagaaattcatgaaataagaaccttctcgagaagttagaggcattgattgagatggtttaaagctgccccttattatatgttttactcccaaggtagacatcaaagtggctaataattctatgtctgatatctaactcacttctatgggaatctatacaacatgttttatttatgagacagagtctccctctgctacctaggctggagtgcagtggcttgatcactgctcactgcagcctcaatattccaagctcaaacgaccctcctaccacagcctcccaatgtagctgggactacaggcatgcaccaccatgcctcagctaagtgtttaaaaaaattttttttttttttttttttttagagacagggtctcactatattgctctggctgctctcaaactcctgggctcaagcaatcctcctgcctcagccttccaaaaccaggtgtttaactggggactaacatgaagcacttagaagactacatggaacatagtgagctacataaaatatttgctattagcataataattttattgtatatcttaacaaaattgtgtgttttacgcaggtggcatgccaatggaagtattctcctatagctgcacttaatcattcttaccactgagagttgcagcaaatgggggacataatttataacttacttttctctctgtatgactcattaggcaatgactatgtatgtactacaatgtaaatagcacctcctggatggaatagtatgtaactgacatgaccagcagagacaggctaaagacactgagctgaaaaccctggactctattgctaagtcaaggctcctgaatccgttcactctgagcaactgttgctgtggtgctgccttcacaagcactctgctgagtactgagattgaggggctgtgctatccttcatcagacaagctgcacccagaactgttcagctgacagactgggagcaatccagaaacacagtaatggctacatagtgaaaaaaggccaattgagattctttttcatagagagaaaaacataaacacgtgattgaacgcatctcctgtgttagactaattgggttagatttgatatttaattgctaaaaatacatttagaatataaccttactgtgtcaaggtctcaaagaagaaataattggtatggtataaaggattgaattgtatgctacaaacctctaagctaaaatattttcaatgtatgcaaggataggtggcatacatattatatattattcccccattaagcaaatttataatgagagaaaattatcttccataaaaaaaaaagccatgtaaaattaaggactaagtttttcagcacagactagacaacgattgctaacacataaggtcaatgagagaacagtcagagaaagcttcatgaaaacaaaaaaattgtctgccaggtctgaatgaatgaggctagatgaacagaaactgagaaggcagaaaggatagcatgagcaagacaagtgctgaaatctgcccagttaactctgaggataaagtccaatggcagggaaataaaaacctgtgtccacataataacctgtaagtgaatgttcacagcagcatttttcataatagctaaaaagtggaaactaacctaaaggtccatcaactgatgaatgaatggaaaaccagtatagccatggaatagaatatcatttaactataagaagaaataaactatgaatgtgtgctaaaacatgcatgaattctaaaaacattatgctaagtgaaaaagccagtcccaaagtatacatatacatattgtatatgtatacatattgtataactctatgtatatgaaacatgcagaacaggcaaacatatggagacaaaagtagacagtggttgcctacaacaggggtaggtggagggacatggaggaaggctgcagtcatgcctaggagatgtggggtcacttttcagggtgatgaaaatgctgtgaacatactaatagatactgagttgtacattttaaatggttgaactgtctgatacgtgaatgacatctcagtgaattttttaaaatccaaaggcaggatcaagataattttctcaactcttaatttttgatgtacatgctatatcaaatctaaatatttctacagttttacagtatattttaaataaaagatagataaagaaaatgcctaacttttcaaatagtttgtaaattaacctaaaacatgcacatttcaaagaatagtataacggcctttctgtacaagttaacctagaatctgtgaaacaaatagacacagattctgtgtccattcacaaaagtgaagaaataagacaattttctggaacattccatgaaacattctcctctgatttaatctggcctgcctcatcagagaaatacaaaaattacttaaaaatactgtttaacaggaaaaaagtcaattttctatgaggaatgatgtataattctcaacttttccaagggtacatattgtaagagaaaaggtatgcaatggtttttcaaaatggtagaatgaaagtcacaacataaaaaaataattataaagatagtaaaatggaaatcattcattataatgaaaataaaaaatcaagcttctgccaaaattagtatcctaaaacatgttatataattcaactagctacagaataactgttgacatgttaaattccatacatacttgactttccacttgaaataatttcttctttgaggcctgtgtctcatccaaattaatgtgacaatgtgatataccttccagtggagactctaacgttgttaatttttttacgctgtcagccacttcttgttgaagttgtctcacaaccacctgataaaatatttttgttactgattttataaattgccttattattaaattatgttaataatgtttaattctaacatatctactttgaaaattatcaccacacatatcaattcaccttcttttaatcacatgtacacatttttatgtattactgaattcagtgagggatgcagaatatgttctcttcctgccaaattggtattctcttacttacacaacagattcattccaacattcaatcatctcagaagctcaactcagcctcaaagttcctaacatattcaatcacctgttcaaatccttccaacagattcctatctcagaataaaagtaaaattccaatggcctttgaggccctaggtaaaaaggcctctacctccctctctgacttcaaagctcctacaactccctcctgtaattactccattcccactgtatgtgaagcctgccacccctcagtctgaaaatggagatgtaatgcctaactcgtaaatcacagacagctacaagtatctttgtactgaacaaaattatattccaatgacagtcattgagccttgaaataaaaattatgacctaattattaatataaatattcaaagtaaactataaataccagtgggaagactaaaccaaatatagttttgctaagttttaccacatttctcctaaattatgattttataacaagtaggtgcctttaaaacattacgtggtcataaaaatacgtaatttgacatattttcagatttgttaaattaatatgaataataacaaagctataccaactaaaatacataaaaagctagttaaagcaaggtactacaagacacagcaatacacttcaattcatctggggaatctagaattaagtgtcgaagaaaatcacttaattaaattttaatttgaaaatacttcaggtgtaaacatttccatttataactacattatggtcttaacatgtggcaatataaagacattaaaattactatttcagcagtacagaactatctaccttaaaatatgactctgtgcctaataaaatttcataggtgacacaatgtcttttctcaaagtaaatcatctctcacctcttttatttcctagaaatgaggcatgtttctaagccgatatagtaaacatttttccttttttattaaaacagctttgttgaaatataatttacatactatagaatgtatctgttttgacttaaagttaaaagatttttagtacatttactgagttgtgcagccatctctacaatccaactttagagcatttccatcactgtaagattcctcatgcccattagcagtcactaccagcttccagccccagccccttgcaaacattaatctactttttgtccctatacatttatcttttctggatgcttcatgtaaatggaattatacagtatggtaaacacacttttwatctagatttttatattcaactaagttcaacatgtatccagaaccaaatgtttaaattktctttctaraagtttgaaaatatttatcttccttgatacttactactmyttctgytttctctctctcatactgaaagagactttcttttaaatgatcacattcattcrttagcttcttacttttctctwctagyacgargtctttctttccactctcaataaagcctctttggatattagttactrtctctttatgatcctctttctgatgaacgtcatctagttgctgtacaagccacgcattttcacgttggaggtgacatatcctctcttctacacagttccactttccagtggaattattcactttagcttctgcaytttgatacatctctttcatttcctgtgtttgctgctgtgtttkksttaggtyrttttgtacagtttctaaagccaatracttttttctgagactatctcttgtcttamrgaacttatcttttaaggyattgaatttaatttgtgtttcagaaagttgttcagtaagaaactcattctcakcttttactttggaaatagcagaactcatttctacttgtacagaaacatctygtgttctctctaaagcaagttttasgtttctttctgttttcacactttcactgtgtttrcytatagcagcagccagtctagactgataagattcaatgtcagcttccagtcttttcttgctttctttttccttcaacagttcggcattgagccttgtattctcagccttgagatmattaagctcttgttgataccggaatgctgtttctgttatcatttcctcattgagttttatatacttttcaagggcagcatttgtttctttaacaattttaatgtccttaagatatttattttctttttccaagttgtcatttttcattgtacatatttcctgtctgrgtatrgcaatatctgccttcaaaatgcaattttcatccatcagacctttcrtttcttcatgattatgaaaatcctaaataaaacaaaagaaagttttagctagtactcaataaaataacatatcatgattacctctgaagttaaagaataacctgcacatccgtacactaaaaagtttaccataagtggatatccacctggagaaaaagttgaagcaaaactttgaaccttatagagcataaattccagaaagttcagaaatgtatttagagtcaatgaatttataaaagtaaacacacacacrcacmccagagaatttttaagaatatcrgaattggaaaagcctttmcctgaattacaacaaactcaaaagcataaattaaagcattaacaaatttgrctaaattaagatatatcaaaaaattrcatttacactttgatayctaacccatacaccaccctayagtaagaacttttgttcacacrtatttggacagataaaatttcccagagttattacagctctgtttyacygataacattctatttcagtttgactcttttaacacttttatagtcagttataagaaytacattcactaaatcataaactagacattatactagtcattcctatatacattcattgatgaacycatctagttaccayaattttgaaaaagaaatgttaaaaatataagcaagctacaggattttccccaggwcttctgactctacttctagttctccaacagatcacagttacttctgtggtgtaaatacatcaatacgaaagaaaacttttatttcaaaayrccaayagtaaataagataaaatttatagagctcttcttagaatatcatgagattatttgygattgcaataatttctgyttcctctttataatattaggtgcmgtaatcaatatgaaatasgggaaagtacaaggaaaaattttacctggaacaaaatttttatcaataggttatcactaagtatawattatggcatattattgttttcaaaagctctttgtaataaaataatatcctatgtggatgccaagatttataataaatattaataattgtacctgtaagtgtcatcattcatttttaaaaatgagataamatttmtggttttagacctaaacaatatatattaaatcaagtggayattataagtaacagtgataagataaagtttaaaatatagaatttttaccaaagattgatttacccratttggagtatttcttgcagtctttgatttcatctctagtgactgaasagttggttcaagttgttttgcttcaacttctttcttatattgtttcyctttcctttctaattcttctctattttttttgyacagcatattaacrtttgttttttcttcattttcttgttttaaggtgcatctgcagatraagacatttatcttaaaattcattttgttaaaaaataargagttcatcctgtkatmtacctctgcagatrtttattatcctaayaaaatttctatrttctggattatttttcctttgcagttctcaratatttaatttctcacttcaacatcttcaaawgaatgcatatacttgaaaaktagtaaggaaagaatattctgctaaagyttttgttactaktcactctaatatayattataaaaaaggataccagagataattcagtaaagttacaggttcaaaattacctttttaaatcacacagtcataattactccctaattagaaaagatcatttacaatcaactaaatttttaaagttactatttattgacaagcrtataagttcactagaaataaattttcatctttatgaaatattgcggtgtttctccaaatgatttacagagtgagatgacaccttcagatgtctctcacacaaactatatctgcagatgactgtcatccaaaactaggctraagagtctaacatctgtttccccacactttttatawttmtttcttaatactttcaattcaccttcttattacatatattttatacattcattaacctattgttcattatgtgtaayatataattaatgcccttaataagtgtgtgtatgtttacacaagttatgttttcctgtgaaatctagtcccagaagtggagttgttgagttaaagggatgtcaggctatttgaaattttgatacacagcactaagttaaccttcagaaataatttacyaatttcctataccaacagtgtatgagaatgcctttttcctcacatttgccaacactagtaattacttcttaaatatcagcatgactttacaaaatatatcttattttatgttaatttgcwtttttctgawtaccaggcagggctaaatacccctggtaaaaatataaaacttgttaatcataaggaatattagtccaattttgaattagtttatagcacaatgacaattatctcctgtgaaatactactataggcggccaggcacggtggctcrctcctgtaaacccagcactttgagaggccgaggtgggcagaacacctgaagycaggagttcgagaccagcttggctaacatggygaaatcctatttttactaaaaatacaaaaaattagccaggcatggtggcacatgcctgtaatcccagctactagggagactgagtcaggagaatcgcttgaacccacgaggcagaggttgcagtgagctgagatcacaccattgcactccagcttgggcaacaagagagaaactccatctcaaaaaaacaaaaacaaacaaaaaaaccccaaaaccaaacaaaaaaacacamactgctataggcttacytatcatgctcttccttcagcttcttgggaaattgctgaggatacgttttcccaatctttctttgttgggttaatctgycagcagcagcagaaratgtactatsacatatattttctgaaagttgtattttttcacttttgtttgtattatttccttytttgacctttaataaaagtaagatgaataataattgttattattttattcaataaaaagaactttttccctgatttttwttacttgattcaggttatcaccactttaatgataaaagtattttgtgcttactttaattttatcattatacataattattatmattataagatactyttattttatcatcgaaatttttgtcaaatctgctcatttctgtttgagkgaatagaagmattttcyaaaatttcaaaaagggctcttctccattttgtgcttttattcccatccactctttgctatctggtataaatttttatgctatctggctggcagaaacagagaaataaaargacacaggcataayatatgtcttctgtctttactacctggattttacatgaaatagccagattaagargatgtgacmttgtaggccttcaggaacagtaaagaagttttcccttttctgtactgagctactcttttccccactgccttttatctctctttttttttttttttttttgaatcctgtgatatcaaaaaagtaaaaaaagtaaaggttctctttgaattatgggaaccaacgtttgccacaacamaagaagcagagtgaaactgctgagtttctagtgcmgaattctggaaaatgagatgcttcccagatttcacattcaattaccacaraagtttataggtggaaaacatatggtacagttacctactttaacyscattatctactgataatgggagtcaaaccaaccaagacatattaaatgtttcatccagagctcttgaggtggcattcactagcatttcatggcaccatataacatgatacaattccatattgcygaattacataaattrccagataaatttatcaaattagtcagatatattaaaagtctaaccttragcaaagcaatttaatgcctcagagggtggaaaaaggcctcatctgcttttactttgaaagaagaaaatctctagatttttgtctatctttagaacacaatgtacagaactcaactttctactaaagagtcaaaggctaaatttttggctaaraaattatgcttcttatatgataaaaatcatacatgccaaaactyaycatactttattaaacaacrtaaygtaaggtctgatwcaacagaaatattgcagartggtgattttttaaaatatgtgtaagtatatgtttgttttcaamaatattggaaataacyatgatgggactgtaagttcaaacagttygagctaagcagataaacttgyrtgcatgaaaayacattaaacagactcatttggctgggaatattcrttgcaamtctcaaggctagaygtgtttttgtggcttgtctcagtcattgcttycctcccattgtattcccattctatcattaaataaatgtaaatyatctctaaatgaatacaagaaaaaagaatctrgaatctagagcttgtttctttagcaatttctttatgttgatctggttcagaaggtcacatggtatrtggctkaattrgtttcccagctcatacgccacttggaagactgatagtgagacataggttgattaatgaacaaacattatgagaacattctccagaaccattattyagatagcagaactaatctactttgacacataattacacatttagataaccccactgtaactgtayacatgagattttcttgaatagaaaatwtgactaaatcaaataattgataaagaggaaaaagmagcagcaagtgaacctctrtctttttgaagttggacttgcttttctccaaagccaggaactcaacttgtaacatgcctacctcattctttttttataattattattatactttaagttctggtacatgtgcacaacatgcaggtttgttacatatstattcatgtgccatgttggtgaccttggaatatmttcccataagtcttctagctatatttttgatgttctctcactatgtggyaaagaataactcacattttataattcaagattcatgcttctgtagttgttagcactgggaytgccatatagtggctkctggaataaacgctgtattggttttctgttttcartaagtatctgtagcagcagaaatactgtggctttctatctgaatcatatgcttcatttctttggggtgggtaaacaacaaatcaaaaagactttctggatctctagactgargccaatgyctaatgtccaatttccaattagtggtatctgggtttacattttttgccatttgcatgtcaaactcttaatcatctttcatttcaatcataattactgggttccttaattttttggtttcwgtatcattacaaaaattttcatcatctgtgttagaaacaagctatgtgtctggtttgctatcaytttyatagtctgatttattttcatttaaatgaagcttagaagatgactggtaactgtatttcagggacctggagtatgaatggaataaaaagacatttgacatgggcttcctctgttcaggcgctgcctggamtgccacagasttrgaccctccagatgcatcttcctcctcacaatcagggacctgattcatcagattagagggcactccttttttgttcrtccctctttagagttactayrtaggagctcttcctcagggcaagcagtaattctggagttttcaaaactttcaccaatattcagctygaacttgtttgtaatgaattttaaagaaagtcgtgaatatacagacagattattccctttatcacaattcttacccagttctggttcttgagacttttttttttttttkgcaggtgcaaaatggaaaacaaatttgcttgttttgtttctcaratgycttttctgtcagagtgcatgttttaaaattagctttaatcaagyataaacaaaaatactagaaaataattaaaatttaactgtgaaacttaatctatgtgttgccactcttaaattatrggattgtaactaaaaagtgaaaaataatttgccttggcttaacataggacagaaawatgaactggcaagctgaackcttagcatttgtttsgattaaacttaatgcattatgtgtaaaatctaccagaaatgaattcaaagctgataggtagtattataaaatcttcccctcttacaaagattttacctcakcataccagcaaaagtgagcccctacagtgcgtgtatatttctgaagattaactagagactagggaaacactgaattattaagagccaaactgaacaccaataagaaagggaagcaaaawtttaaattctaattcaaataatatactatgatagtgttatgtacctagatggattttctgcttgtatccacttctaatgtattttaagttccactagtgatagtggatggattttttaaattttagtaacatttactatgtatttatgtcaaaataaagttattgtttgtaccctgacaccaaagrtcccattccacaaggtacgattctcttaataggcaactgggttgatttttatgacaccaytcactccctgaacacagacacagaactcaactsgtgaccacaaaacagaataaatctttaaactcggcactgrtgaccagcaatacaaaactgcaacatttgaaccactggcaatgatgactcctttaacactactttaactcagtggccactgttgttaaactgttcataatttctattccttaataatayaacccaatatttcatgttaccttctgtattatgagtaaggttatacaaataaaagagcaagataattctgaaaatgtcttgcctcaattccaagggtaaagacagctatgagttactagagatagtaagaattaccagaataactaatagttactagagatagtaagaatatcttaagtttcataactggttaaratgttttaaaaattaaatataaaattatgatctatyggattctaaaggtataatctaaaaggtcatgtcatttggactatgccttgwtactaaagaaaaamaacaaaacccaatattaaacaagaaacttaaatgttcatatacctgtggttgcttcttttcacttctttcatgcctttsttgctcttcctctgaagccactggtaaggcttgttctgttgacaaattcaytggtttagttcaaatgaactaagaacagttagataaagactataatctatataaaaataaatagagaataacatttctttgtattttatattttgagagtttcaatgaagcttaatgtttactgaaatatttagttctttaagaaatacttctaatcatccaaaayttcaacaaamcacttggggagacaytagawatcaccaggttcaagccatatgaaatctcagggtcactcacaaattgttccacccaacataaatcaacawaactgttagaaacaaaacaaaattttgaaatacagtcaaaatatacaatgtaacactttaytatacttcataacagtatctttttaacaagacactaattgagttggcagttactaataatttgcaaaattattgttgttyataccttaattagtgtgcaccccattttttacatcgcaaatgttttcccctactattctgaaaaatytattttcatcttttaagactcagaaagtaggctgggcataatagctcacatctgtaatcccagcactttggaaggccaaaatgggrgaaytgytcaaggccaggagtttaagaccagcctgggaaccatagataaccttgactctacaaaaaattggacaggtatggtgatatgtgcytgtagtcccagctactcaagaagcttaggtgagaagatccctcgagcccaggagtttgaggttgcagtgagtctcgatcacaccatcgcactccaccctgggtgayagagtaagaacttgtctccaacaacagaaaaagaaaaaaaaaaggctcagaatgctgtgtgaagtcttccttgattctagctatctttctccacacacacrggtrtctgcttcattggagtyccttagtactttgtcaatttttccagtgtcactttaccacctgaactgcacatcatgtcttwacatgtcgatcccctttgctgctagactgtagaggacaatcttttgaatmatctttgtataaacagtcttaattttgctaaataattacttattgagttcctgctaagtgttaggcrctggggtataaggaaggaaaataaaasctgtcagggatggctttcctaaagatcatgcatgagctgagacttaragagtaaggttagccagattaagtgaggcagagggcargaaagggtgagcacatgccaggcagcaacaagagrgggagagaagcctccaagagagtatgtatttctctgcaaaagaggaatggtgagggggccattaccagcagctcagtaattccagagaaaaagrcagatggggaaagggctgcagatggggaaagggctacagatggagatttgggcagaaatcagtttccttttctttyctttttttgggacaaggtcttactctgtctcccagactgragtgcagtggcatgatcttggctcactgcaacccggcctcccaggttcaagyaattctcctgcctcagcctcccaagtagctgagattacaggcatgtgccattaccacctgctaatttttgtattctattagagatggggtttcrccttgttggccaggctggtcttgaactcctgacctcaaatgatccacctgcctcagygtcccaaagtgctgggattatagacacgagccaccatgcccaacccagaaatcagtttctgaaatccttatayaaaactttaagrtgcttggacataggtattcaggamtggttcacagwtctatttgcattagagataattaactctaattattrtraggagcataaaatyctgaggcayataaatcaatgaasraagataaaatataaggcagtgttgcaaagatgmtgcaggcctgaggagatgttttcagaaatatttaggayayaagtatcagtggccattataagaatgaatttttattgaatgaataaatgtatatatctgggtccctggagaaatacactctgctcattactttacaaattttatcaaatgagaagtaaaataatatacataaactgtttcagttacttgtatttactttacactttttctgtttcagttttactgtgccaaggaaatgcatttgggttttgtggtggttgttgctgctgctgttgttgctgytgctgctgctgttgttgttgttgttgttgttgttgttgttgtttgagatggagtttcactcttgcttcccaggctgaagtgcagtggtgcaatctcagctcaccacaactgctgcctcccaggttcaagtgattctcctgcctcagcctcccgagtagctggaattacaggtatgtgccaccatgcccagctaattttgtgtttttagtagagatgtgtttctccatgttggtcaggctggtctcaaactcccaacctcaggttatctgccygcctcagcctcccaaagtgctgggattacaggcacgagccaccgcgcccagccayatatggggattttgttttaaaagttctgtttcctggatctaccaagctcatgagaaaatagaagcaaacamgtcatttgcataggtaagaaaccttgcatttatacttcgtcatcactactctagaagattatcatcatgttktgtaaaataaaatgttaattctagacataaggggaaaragaaattaaaactataggggtgaaaaaatattgcataatttattactgttgacmtsaycatatgactgattaagggcactgaatttaacttgtatgtgaagtagaccccatattagctgcagttaatcaatagaccargtattctagcagaattaaatttgatgctcctgtgttatctttaaatgatacagctcttctgaaaacccatactyatagtgcatgattatccattaagacaaggtgatggaatgtgtgaatacagcksaggagacaccmcaaggcaraygctcaatggttcccattaatattggggaaakcaacmttataatacagaaarccataggcattatttaatatttggytttggaaggtatttttagtgacastgcatasagttgtacctaataattgcaaaattasagatgtaaaaataaaacaaaggcacaytktgtttgagtaggaaatctgtagacgtctagctggttttctattccaggcccaaaattctaaatataatcatggwacccgcacacaaatttatgttaaataccaacttcaatgaaattactctttctcctcattctctttgttatttatatgttgctttccttaagggaagaatacaaatgccttgctaagaagcattytgtttggttgtaggctgcataaagggagtaaacacaaagyacatttgaccacarratgactttttaaaagcyagaactatggtagcatgaarccaactgaggtaatctagaataaaattttctatgtttgtttcccttctttgctctctttctactctaataastgcgattcacagaggtaatgaagagtataattccctgataaaaacacagctccaagattaatcctttctttaactatgaagttcgygggtccaaagtcttgtagttgctgtctgatttttgatcatggatggtgatacagatatttatcrtcaactcataacttcccaaatctttgaaaagtcttactattgatggttcaactagtagaaacataatctaaaatatctgacaataaagtttttattagaatgtaaatagtaatacaaattgtaataaggtktaaaagttctttcttcactgaagcaggaccatgatgtcctgtaccccacaaacacactactccctcatggtctaaygtattttaaaagtcctgtaattkctattaactcagacaagtttacttaacttgttctaagcttctgttatttactacaatttactttatcactcaaysatctctattatatatgttgttttccatgagaaatttttttattaataattaggattcttcagggataagaaaatatttgaataactaagtttgtgcataaacacattaaggtcaaatacccatgacaatattgtgtgtttctstgtactagagacaaaaacttcaaaaaaawttttaatgaatatacattaaaaactgctttcattamactgagaygatcttccctcaatgcatgaataccttcagaattcacawagaccaaagaattgtataaaatataatagccttaaaaatcttatttgtacctggcacagtggctcctgcctgtaatcccagcatactggcaagctgaggcaggcagatcacctgagatcaggagtttgagagcagcctggccaacatggtgaaaccccatctctactaaaaatagagmatttagcagggtatggtagcacatgcaggtagtatcagctactcgaggggctgaggcaggagaattgcttgaacccgagaggcagaggtggtaatgagtcaagaccgagccactgcactscagccttggtgacagagcaagactctgtctcaaaaacacaaacaaacaaacaaaamacctaattgttcccacataagtctatrttcacacaagatctgaagagtacacaacaccgtgagacaggacagacataaattttaaaagttatattctggtttctgtaaaaataaaayggttgaatttaagcttttaagacaagtcaaggaaaagagcaaaaaatgcaaaagtgaaacttgaaaggtcattttcccatcaagggctcatgatccactggacattcacaaactatattgttcaaaacattagttctgaattttgatctgagtatcccyggagttkcagtttcattcaaagatgtccaagaggtcaaataagacaatatcatttgctattttcagttttcttttytgagaayagcacaacaaacttcttcagagaaatgaatygtcctaacttcataggctaaaggctcatgagtcacagttctaagggcatttataaaatatggtggtgcatgcttgtattctgaacttttcaactttaaactctcatatagtaaatattaataratacaaactgattaaagaaaagcccacttaatctgacattatttttmtttttctttctttcttcatttatcagcaacaggagagtctaactaaatgtggtaaagtggtataagggaatacaatgaamagtgtaaaatgaattaaaccagagataatcatatcaatgtggatacatctggaaaayataatacaaaatacaccaaagaaagtggcagaaaggtatgtaaagtgtataaccactcacataccattttgggacmcaaataaaaaattctgcatattatttctgagcatcacaatatagttaaagatttcaaaagggcattgaaatgaaaaacaaccaacttatgatgtcggtagcctctatgcaaycatgttttaaaaaccttaacaccaaaaagtctcaaaatcaccattttaaaagactgtgtctaccagttacaaatgaatcattactttcctcatttttaatagtcaaagatgccacaaacacacagcagcaagcctctaaagttaaaacagaatctgacatgttaataagtaaagctttcctctaggtaaagatcagaactccaagtagcacttaactcactggaaatatcttagagtctcaaaattcactgctttgaatccctgacagrtataaaaattttatactgaaaacttcatgctattcaaaacattaaaagagaaacatctgagttaaagcttacatttttaaaatcttttttatgcttctaaatttacttttattcaaatatggataccaacaataayatttatgtcaawgccttccattcaattttaaacaaatagaattaggaataagaataatgtgagtacttccaatcattgaatgtacttatttmcrgtattccattaaatgtacctgctctcaatgtctgtacathctttctttgtactgctcctttcacagcaggatcttccactccagtggtaggctgaatgggttttaaaagaaaaygattcataaatcatatatgttttatacaacatggagttagtgattcaaaaatatacataattaattaccttcaaggaaggatgttttgcaggaggycctacaaagcaaaggggatatgtcatcaattatatgtaagtatgacagggccaaccaaacattcatgcagtgktactatcgagctgaattctcatgcctggctataaaaataattacttaaggtttkgagggttcttcttggcwtcttttcattgcctaggacrgcaacatgacagaaacataatgaggaaaataggaatataggattcctaaaatgcacagtttacatttcagtagtgagattatgtttcaaatgcctatacctaaaatagaaaagcatggatatcaccgtgaacayrtggactgatgaggagaaaagggaccattaaacagaggagcaaatcaaacctgagggaatcgacrtcaaagctgatggtgaatgtacagagtattttaactcaacacakcagaggcattgctgccagcatgccacaaacaaattcccctygtcttgtcactgaggaaatacacagttgggatgacagttcaggtgaawgtgtgattcacctctcatcaaagaaagtgttctacattgatcagctcttatacacacttakgaaatgacagctaatcaaactactcatttttcccatgatcacatgggctactgcagcacctacatttctcctgtcccctcatttggccttcaattagagctccttgatccactcatgcaaggcggtccataaaacacataaaccatgtcgaataagcttccgatatcaaaatatttakcaaaaaagaaaacactgaattaccacagacttgctggatatgaatacatatttaatttcaaaatcagtgcagtatttattgaaaaagagaattttggtattcacagaatgaattttataatatgattgcttctaaaattaactaagtttggtgtatyatcttacactgtaaaggacttttataaaacarctatcatatcaaagaactggctgtctcaaaaaaaattagccaaagcatctatatgcaacttaatcacatcttattcmctcatgtcagtgaaacttctctctctgaggcctgamagttatcaagtgaaatgagctgctgtggtttaccccaactctagcactccctcctgcctccagtactctccacagcaataacctcttttgtgagactgggcatatgctgaagcaactggaagtgagttgtctcaagtttacttggcttcaactcccaagaccccagcaaatgtctttctttcctccctccgtgtsctttcacaatccctcttcctttgaaaaaktgatttttagaactgtcatcctgatgcttcccttcctaactgctttttatggataattgtgaccactgacmacttttttcatctgtattcagcagtagtatacacctgtaatctctctgttttcatctcattctccttccyctgtggctagaatcatgctcagaaataaaaggaaattaatgctttccctggattctgttattttttaaattgctctccaatggttctttttccagagttctytaaaggaaggctattcccttgctattyagagctgtgtccaaggaccagcaccaaaatcacctgagtactcatgagaaatgcagactcccatacctgctgaatcagaatgtgcaccttccagaagcttytcaactmattcatgacaatttgaatgcccygttctacactgatgtgcttccatattggtttaccctaattgcccttttgscctmgcctcaatttcttccctattatgtmcctcaatttaatactacattrtaagccataatgtttctaatgaacttttaatcaggyaatacttctyaaattaatttcttctccataaatcacccaacactattcaattaygttaatttggcctatatgatactatcctatgaggttacattttctataaaaacaaattatagccatacatggctgaccatytttggtgatgttcatctatggtagacaaaacacaggtctgtgtggkgagttgcctcratccttaatgcctccccagtatygaggatgacagcaagagaaggaaaatgttattctaattctctgacacattttcgtactggaagctcactttatcttctttcctgtttctaacaccatgttcttccttcttctacagatcaatttgcctttactatcctctattacttacctctgcatatgcttttttatttattccatgtacactccgctctcctcattctttctttctctttattcatttcctcttccctctctcctgacttgcctcaggtcttagagtatcttaaaatggaactcataaytcagctcctttagtggtactcctgatagtatcaactgctgacccttggttagacacacaacttatcaccatttcacttctcctttacttattatacagttaataggacactttctttagctattacactctattagtgytcatattttcaaataaacattccatcaaatgacttttttttgttttgtttttttctgagacggagtctcgctctgtcgcccagggtggaatgcagtggtggtatctccgctcactgcaagctttgcctcccgggttcaagccattctcctgcctcagcctcctgagtagctgggactacaggcgcccaccacaacacctggctagttttttgtatttttagtagagatggggtttcaccatgttatccaggatgttctggatctcctgacctcgcgatccacccgccttggcctcccaaagtgctgggattacaggcgtgagccaccgcacccggcctccatcaaatgactttttaaataaaatacggttctcaccttctccttgtccattgactattctgtttcctttttcatgcgaaggtccaggtaaaggctctgacactttctcggggacacactgctaaggtaatatcaagaattagtttccattttaaaattataatgagttgcatcaagagtttcttrtcaatctctttttatgaaactgggtctcactctgtcaacccagggctagaatgcaggggcctgattatggctcactgtggtctcaaactcctgacctcaagcaatcttcccacctcaacttcctgaatagctggaactacaggtgcgtaccatcatgccatgctaatgtttttattgttatcttagtagagacaaggcctcattatactgtccaggctggtctcaaactcctgrgctcaagtaaatcttccacttctgcctcccaaagtgttgagataagcagtgtgcaccaccacacccagccctaatcaatttctttaaatcaatctcaatgytgcccaggcatggtggctcacacctgtaatctcagccctttgcaaggccaacgtgggtggattgcttgagttcaggagtttgagaccagcctgggcaacataatgagaacacatctctrctcaaaaaataccaaaaggagtcaggcatgatggtgtgygcctgtagtcccagctgcttgggaagctgatgtgggaggatcacttgagcctgagaggtggatactgcagtgagccaagatcatgccmctacactgcagcatggrcaacagagcaagaccctgactccccaaaaatttcaatttaaaatrtgagaatgaagagagatacaaacaaaaaacaarcctaattggtcaaygaaatatgagcttaagccaagaaagaaaagaracarcatgaagtacrataaagtacatggggaaatagatctataacagagccttttgctctttcatatccctgataatactaattaatatttatgctacaattagttttttgtaagtacttctgtgatagagtttattactataagacattcaattagctaaatatggtcatcgaccactacctgaaagaacattattataagagagagagaaaactagaactttcaatcagytttccacccagaaaaaaattggtcaccagaattctaaagagtaatgtatggcagacacatgaaaaaatgatcatcatcactggccatcagagaaatgcaaatcaaaaccacaatgagataccatctcacaccagttacaatgacgatcattaaaaagtcaggaacccacaggtgctggagaggatgtggagaaataggagtacttttacactgttggtgggactgtaaactagttcatcctttgaggaagacagtatggtgattcctcaaggatctagaactagaaataccatttgacccagccatcccattactgggtatatacccaaaggattataaatcatgctgctcaaagacacatgcacacgtatgtttattgcggcactatttacaatagcaaagacttggaaccaacccaaatgtccatcaatgatagactagattaagacaatgtggcacatatacaccatggaatgctatgcagccatgaaaaaggatgagttcatgtcctttgtagggacatggatgaagctggaaaccatcattctgagcaaacggtcacaaggacagaaaaccaaacaccacatattctcactcatgggtggaaattgaataatgagaacacttggacacaggatggggaacatcacacactggggcctgtcgtggggtggaggaaggggggagggatagcattaggagatatacctaatgtaaatgatgagttaatgggtgcagcacaccaacatggcacgtgtatacacatgtaacaaacccacacattgtgcacatgtaccctagaacttacagtataataataataaagagtaatgtatggcttgaaaagrtatatttaatagaacatgagttggagctaataaaaagcttaagaaatgttaatctaaaatctcaatgttaagattccagttgaattatactagaaaatatattgtaaccctmtttgctactgatgacctatttctattttatttcctttttaattatggcataatttytcaacataacatatcaaaacttatacacccttaaatattaaaaaatacaaygtaagcaatattttaaatacaatatttaattattagatacattaggtttattatattacttataacattccattatataaaaattcatttgtctatttattcagattaaacaactrttaaggctgaatrtcttatgcctgtaacccagcactttgagaggctgaggcaggcagaacacttgagcccaacagttaaagaccagcctgggcaacwaggcaaaaccctgtctctacaaaactcagctgagcatggtgacacaggtctatsgtgacatagctctattgtttmaactactkggatggctgaggtgtgaggatcacctgagcccaggaaatggagatcrgagtgagccaagrtctcaccagtgccctccagcctgggggacagartgaaaccccatctcaaaaaacaacaagtaaaatgcttcttacatggaagaatgtattctaggtactccaggatacacacaaatatgtttactgamctccagtagcttatggtatgcaggagcttccaatgattatttaaacaactaaatagaaaaccttctgaaattcaaamtttcagaatatgatatgaggactttgagtggttattttatttcttaagatgtagtcttgctctgtcacccaggytggagtgcaatggtgtgatcttggctcactgcaacctctgcctcccgggttcaagcgattctcccaccttggcctcctgagcagctgggattacaggtatgcaccatcacgcctggttaatttttctgcttttgttttgttttgttttgtttttggttttttttagagacagggtttcaccatgttggccaggctgatcttgaactcctgaactcaggtgatctaccgacctcctgaactcaggtgatctaccgacctcggcctccaaaactgctgggattacaggtgagtctccacrcctggtgaagtaaatattttaaataaactacaatgacaaaattatgatgataaagtcttaccatccrttggtattaagagtctctgcttctagaactggttatttgcagcaaaatacatgttattcaattagatgaagtgccttatataaactcttcatrgayaactcataaamcacacaaaaattcctttgcaatacacattttgagaacataaatttaaatttctatatttccacaatttatatttttaaatcagatacgatgttgcccaggctgttctcaaactcctgggttcaagcaatcttcctgcctcaaattcccaagtagcagggactacaggtgtacaccaccacactcagttatttttctacaatttttaattttttttgtctcactacagaaccaataatataagtagaaaaacaatctctcrtaaaaacaatakgayaccaaaataataagtttccaagawcaaaagctatatgctatgtgctgaatattyttgccactaaaaatcaccaggaggatcccatgattactgcaaataatttgatccactgaagatttatacaggcataaatattaagaaagtcacactcgtatgatttaaaagtcaaagtattagtrtttatccaaataaaccttaaccaaakttcacatttcctctattggagaaagcatttcctaatgtgattttcctgtcactactaattttccaattcattttttttcagctcccaccctgtcacagtacttatcaatctttgttagttaccaaagttaaacacattttttgaatcaactagccatatgtatgtttttctctgaccaactttccatyaccaccataaaacaatgataggtaaaccactgctaaacttgaaaagtaaatactctgcaaaagtacattcagagtgagaaaattaattttacaagagaccactttaccttagtagcaacactcaagtctttgtcatccratgcaggcaatgaatccacacgcagttcatggaaaatgcttsagagcgaaaatacacaacgaaaatgagcaagttgatttctytacaatttttttaactgycagtttatatccagcttccccctcaaaaaargaaaccataatcttgggaaaggtcagcaatctatatattaaatagtgattcttgatataattaaaatatgtcctctgttctaaaaatagattttagttacctatttctgcctccacytgtctaaatctataaaatattcaatgaaaactaacyttgagctttataacaaatagtgacagtcaataaattggcagagcctgacaatgatttgccctcacaaattatctgtcctgaagctraacttaaaattcaattaatggatgacataaattytgttacctaaactggaasaaaactvayracctaaaacaaggtagaaagatccactgtctcttttccrtgatytgtctctggataaaasactaatctgcatcacttcarwatgrcagtcttgattcctcagcmtggaacccacttaggaaggtcctattgmtttcctttgccctaaatcagtacaggaaagcccctacaatatttgaaatgtatgaaagctaaatgtacagaagtcaaataacaaaggtgtatgttcttattgagaatacttttcccagaaakattgaaatattaacaattataaaatcccattattttcamcctataggtcctacyttattcaggtccacataaactagcaagcccttaaaactyttcataggcactcagacacccaaggagagagactgycagaaaaaaacagagtcctggtagktgyacctctatttccctaagtactctctaagtatctgtcttcctatgggctcccacttccagattcyacttctgcagggctccacagaagtcttcaatctttaaatcttcagtctatgaaagcmcagattcctgaaaggatggcctcaaatgaccaggagtaggagctctctatatccctgctcctgaaaaacaagctaactggagtctccatcacctgcccccagctagacacactaccaactacccaactgaactccatgactgatttgccagccagtcatgcccctgamccagcccacatggacatgggaaggacatcagtgaatcgggaaaagaggcagaggtgaggagacacttgtactgggccacagatctatgtagttcagcaatctccagcccctcactactccaggggctctaagccacccctttgtaagtcaggatggaaayagatgacaccacatttctatctgctgcagacgctcctcccagtgtctcaaaatgttttagcatctttcagtaaaaatcttcaagtttgtcagtccttgatttaaaaaaaagcagcaaactttttagagctcccttgaaccttctattttaatatgcctttgtagataattcccaacatcttgtgtccttcatttttataatttatctttatcaaacttgtcataaaccccaatattttgatctcttatagaagagtctgtactcctatccaatccagtgttgtttatcttcaaacttggacttcccctgctcattccattcttatctacttccattgggttcmccrgctaattccattctcattctacccacagactcactcccgtttgtattattaaaacacacgccaataggatataaaaagaagcaagagtactgggctttaacatgagttcaaatctcatttctgccaattcctatgtctaaaaaaaagcatcstaawctctttgagcctcacattctctatctagagaatcatttgaccagaatgttcaacacaggkaaaaatactagaaggtattttaattcattccaagattccttaaaattctgtaattctatgtcctcttgatwctwtctatagraaaacttagaatacatagctagcagagtttgaaaaaataatagaacaaaagaaataccaagaaaagcagagaagaaagttttaaaaaatgmagrcaagattatagaaaagtcayggaaaaagcaacaagactaaaaaatgtattatggaagtaagcagaaatacttgcctaaatggaaaaccaaactgggaagtcaaataatttgtctctaagacttgcctaaacttgcttttgtaaaacttacwcccctatggccaaagctaagtaagatctgccctagagcctttgatggtaaaaataagatactggttaccactgaaattgtcaaatttattaggacaaactcttggactaaccacattctaatgataaatgagagttcaaggtatttaaactctcattaatttagacattaatcaaattaatsaatctgactaatctgattcagacctataccttgatccaagggctgcasagatatctgtcaatctatgcygaggagcaagagacagratttggaaggyaggcaggctgatggtcaaactgtaggccagctactttgttaactatgggatcatgaggcaattaatcagctctaatccatagttgtttatttaataaacagyaggttataggaagacagatgttgtgatggctttatgagatgatawaygcatagaasatattaggatgtctagcccasaatacaacactcaacagataytcrtttcttccatctatrttttcttagttaacataattttttaaatctataaaatcctacctgactgcagattcatcagaacttccaacatctattaaagaaaaaggtaaaaygcaytttaaatcaataayaaatgtacagaatattaaaagcataagwatgcacagtgatgcatccctctaatccaaactacttgggaggctgaggcaggaggatcacttgaggagcccagaagtttgagaccagcttgggaaacatagtaagactctaccttcataaaaaaattgtgcacacttgtatgtatgctttagatcctgttttttgttgttgttgttttggtttggtttggttttttaaagcataagactgatgctttgttacaaagcattcctttgggagcatgcctgggaccttattagaattaacattcgttatamatattggtaggtarttaatgcagtaagaactcttccctttgtatttattagatgcaaagaagaataaatttattaaaatttggtatctacaagtgaactgaagtatgcaagtcatcctagccaaacmcygtgagatygagtaaaaatggtattgttagcagaacaggtgtgatgagtcamaagtgtcaaagagcatgatttctggaccacaatatgaggtkccattaaaacagagtatacagtagtatcccttatccactataygtgcagaaagacacacttgacacgtttttctctrctgtcacaccacagcaacaatcatcaacaaagaaggcttctgtgaccaaatatgtggagggtttttccccaccaacaagcaagcaatcattcctgctgatgacacaattcaattctcacaccctatctgctggtaacatcagattcaatttaatttataaattaaactttagcatasatatgtatgtatagggaaaaacagtttgtgattcagtactattcatggtttcatgcatccactgggggtctyggaatgtatctcccacagttaagggggagctactgcacttattttgttataacacaacacagcctctctagctcttcagttcaaactgctcagtttagaataaaacaccctatcaccagaagtcagcaaaacataggaatcagaccagaaacaggaatccttgcaaagactttccagctgctactggaaaagagctcaaaagagatcaatgtattactctggctactactctttggggacggtgctgggtggtttacttagttgtagctatttgctctgccctacatatagcaaggcccaaattcacctgcyattttacctcccacagaaaaaccgctggaaatatcaytcctttaagagcttatccgctaggaaccacacctcacattcagagagaagctgaagaaacaccagggaggtgtggcaggctgctgggcagtactatatgatgtgaaaaatatatagaaagaaaaccatcaatgcccttttactaccagaatgttccagtgcttgcccttctccctagtaggggaaaaaaattctttttcacctcacagaaagcaaaactctcttgcaatccctcatgacagaatctagttgtaagtgagtcacatcatcataatacaggctgttatcaaccccatcagtcaaaggaagaggatcagtgaggaacmtatgtattwacctatagcattcactgcctggtcttatttccaaccraaggtaagtatgaaagactttgtgattccagttttataaagtacaaccccttgcacttgtccccttccattactagagagtctatctggacccacctcacagagcaagatgctccagtttgtgctgtgtggtacagcayggtgtccttttccwcaaccctttctattatgtgccacatatctatacaaatcacgttttctaagtatgtaaagcatatgtcatcagaatatatcattctttacaatgataaagaagcaaaaggaaracaaaaggacaaagaasatcttaaatgrctacattcaactgycacggagctttaattttttaactattcaaaaakatatccactgtattatyccaactatgtgactcttctgaaaaaagtgaaactatgaagacagagtaaacatcaatggttgccacgagttgctagggagaaagggagagatgaacacgcatagcatagagaacttttmgggctgtgaaactgttctgtcgataatattacagtaatagatacatgtcatgtcattatacatttgtccaaattcacagaatgtacagcatcaagagtgaagcctgatgtaaactatgaactttgaatgattataatgtgtcaatgtaagttcatcagttctaacaaatgtaccactctctggtggaaaatagtaataatgggggagcctatgcgtgtgtgggaggcatgggatatatgagaaatctctgtaccttcctctcaattttgctgtgaacctaaaactgctctaagaaataaggttattgatttaaaaaagatattcagctgggctcagtggctcatgcctgtaatctcagcactttgggaggcaaaggtgggtggatcacctgaggtcaggagttcaagaccggcctggccaacatggcaaaacttcatctctaataaaaaatacaaaaattagttgggcatggtggctggcacctgtaatttcagctactcaggaggctgaggcaggagaatcacttgcgcctagaaggcggaggttgcagttaactgagatcgcaccactgcactgcagcctgggagacagagtgagactccatctcaaaaaacaaaaaagatattcactgtctatgcatcccaggatctccagaacaacaattaaaataaataaataaatggctgggggcagtggytcatgcctgtaatcccagcactttgagaggccgaggtaggtggatcacctgaggtcaggagttcgagaccagcctgactaacatggtgaaaccccatctctactaaatacaaaaaattagccaggcatgattgtgcatgcctgtagttccaggtacctgggaggctgaggcaggagaatcatttgaaactgggaggtggaggttgcaatgagccaagattgtgtcattgcactgcagcctgggcaacaagagcaaaactccgtctcaaaaaaaataagtaaataaaataaaaaataaagatattcactgaacctgttactatgatatatttaagcaagacacggtgtccctaaaaattagagatcattgaagaccaaagtaacaacatgtggtcattacttctcaaattgagctatataaaatatataaaataaataaatttaattgcatgcttaggtaagaaaatattgataaaaataattgaatattttatcttatttcataattctaaacagggatttagcacaatatgaaaactagactattcatgtaatcaaaataaaagacaatttttattctaattttaactcagaaattattttgctyatttaatttaacaattttactgaaaggttaatgagataaataggacagattataattacctaacattgctatggtaacttatatrcaaatagctgttcatcaccaaaagycaaaaaagtaacmagcactgcaacttaagatggatyatacaacagaaattagtaccaagttaccttatcttataatattatgttattaaaatgaaattttaaaacaacaccaaaaattaagttggggttacaagtgttgkgcagaaaagatttcatatagcaggcaagaggctgccatccatccttagaaaggcckgcatgcaaggctggcccttggctggtgtttaggaaattggaaatgggagggtttccaccattccctgagaagartggctcactgtgtctaaagtgcttatagaaacagtgtatttactctaaacagctgctttccttgyamgagtctggaatttsggtacatgtgagggagagtaacctccatagaaaaacttgggcacttagtctctaatgaractctgstactggtagacatcactgcacataygttgtcaaaatgtgagcctgggagaattaagcagatcccgggaactccacaggacagaactcctggaggcttgtgccttgtttcctccagaattgaccacatgcacctttttyctctactaattttgcttgtccccttccttgttatcaattaaagatctgagtatgactatttgctgagtcctgtgagtccttctaatgaaccaccaaacctggggtggtcttgggaaaccttgacacaaattcattgtgtaagatttgtattaagttgatatgatacatgtaactgtaatcagatggttatttcacagaataactttccctaatctgtttttcttttctttttttgccttgatatttgacttggagattcttgtatttctatatctatccaattgaataaagccatagaaggaataaatgaaaaaataatgtcagaaaataatgtgaaataagcagcaatcctcttttatccgaataaaaaatagagaatctgggtgattgacaatatgttctacaatatgaatgtttctagaaacaaaaatgaaaaagtggtcaattttctgcaactaaactgggcttcattcctttttataataattttgaaggccaagtgcagtggctcacacttgtaaatccaagcattttgggaggttgaggcaggaggatcacttgagcccagaagttccagaccrgcctcggcaatatagtgagacctcatctattaaacaaacaaacaaacaaacaaaaaaacccttaaaaagaaaattagccaagtgtggtagtrcatgcctrtagtccmagctacttgggaggctaaggtgaaaggatcatttaaggccagcaagcagaagttgcagtgagccaagatggcaccactgcacaccagtactgacaacagagggagaccctgtattaaaaataaataaacaaataaataattgtgtatcaggccagatgtaaccacacaaaactgtagtcccagctactcaggaggatgargtaggaggactgcttgagcccaggagttcaaggctacagtsagctatgattgcaccaatgaatagacactgtattctagcctaggcaacatagagagaccccatctmctatgataataataattgattaattgtgcatcattcaagtaaattgtrtaactggagaaaaacatatgactattgaatatactattatagtctactacwgaccatagagttcctgtttacttgcttctaatctttttcttcatttctcataaaactaaaaacatgatttaaacccattaaaggcagttcatcacaaaacaagtcaaaaagtcaaaagaattgcatccaaacagtaggatgcattatccaccgctctctgtgaacagttggatttggtcattaagaatcagcaggacttttaactttgtgtctgtgtgcacaggtgtgtgcacatgtgcatgtgtgtatgtgtacgtatgtaaactatgacagataaaatcattttgcttgtgtacgaatatgtaatataacttgtgcttctcacaaaggaattgcttttccatcttctgtgctcagtagctatcttcaaaaaataatctcctatttgtatgggtgcacactggttcagttctacagttcttattgccatttatttayggtaccagaaagggattgctgagttcccggttctaaagatagttactttcttagtgacacaaatcaatatgtaatacagttcacccttgaacagcaagggtttcaactgcagggattcacttatatgcagattttcttctgcctctgcaacagagagacagcaagatccacctctcctcttcctcctcagcctaatcaacctgaagatcatgaagacctttgtcaggactactwatgctttatgaaaagtcaatatgtttytcctgatgayttcctttctaacagcttcatttctctagcttattttattgtrcgaacacagtatataataatgcagcamaaacaaaatagktgttcatcaactgtttatgttatcaggaaggcttccagtcaattgtgggctattagtagctaaggtgaaggaatcaaaagttatactcagattttcaacwgcacagggatcagagtccctcacccccacattattcatgggtcaactgtagttatttrtttactaaatataaacaatttattataaaaatgaaatyraagatccatttgtataacaagtccaatttgktataatgtgactatagaggaaacatacaacatactaacttaaaartcttttttcttatttatgcaaaaatattatataggattttagggatcataattaaataaatgaatgttttcagacaataatgtttgagattrtaaattagctacaactaccttcttaaataaatctgaatttcaaactaaasaagttaaattttaaaaattaatttacatatgtatatacatatatacacwttcaatttacacatatttttaaactggtcttttttgactgaaactaccttaatcttacatcttactttgtactttcttatcaagagtaggaccaccaagagaagtaagaaattcacaatcagaagtcttacctgatttctcctttttaagtatcttctgtttatgttccaaaatttgttgttgaattctacgtatacaaaagtaataaataaaattgcyatttttatactgaaataaaaaatatttaccaaacatattaaattccaaaaccctttcaggcaatatcagacctaatmtcagaattttaatgtcccatacacttcaaatttgtaaaccttacaagcttattaagcttataattaaagaagaaaagaaagtgaagtactcataaatggaggamgcacagctcagtaaatgaactctagttagctggatatcatgcaaagtgtcctgcactcagagtaagtcctygctctgtaaccaaaatacctcgctctgtaggtattttgtcttcagacaagttgcttctcttaggcttcttctaaaaaayaaggattctgctaccttacttcactargttgtttggaagatgtaatgagattacatgtttawatgttcagagaaatagtaaagcaatggaataatttattcttgaactttattgctgaaaccattttggaatcccaaataatgctcggtgtgtgtttttctgtaagttctaataytcaaatgttgcagttttcagaaaatgttattaagtgctaattttggttattacttgtattcattgtggcttgtaattcagggcattttacctaattcataacttattactaaatttatatatatatataaatttagtgagctcatcactgagctcatcaatcacaccaagggcagaaaactaataggtgtcaaaacctggcttggacaactaccactccttctctacctccycaaactctgagccagcagatctgtgcttggctgctggatctccatggtcctctccaactaacagacaagacaaaaccctgctttgattgtttttcagttccatgaaggaaatrcaagttgacattttctcatttccaagacatgtactaacaacatgtaacatccccttattactcagctctgttcccatttcagagatcaccatacatcaatagtttcatagcrataatcacaatttcaatattgygtgtcacctgttttggttttgctcacactgcttccttggagctactcaacaaatagtcaaatggcctwcctgggactakgyaaaatayggaatgttttctgaatttgtgtgccatccctaggcagtagccatgcttatctgctctgtattgatccaattttaaaatatgtgctgttgaaataagtacaaagccctgtttgatamatggataytcatgagtcatggatgaggcttagctctattaaatccaactcacttacttcagattcagagaattttattgaatggcttcctgtgaggtagaattttaaaatatattkaaaacttgaggaagagctgcaagtagcccaggagattttcatgattatagagacacattacttgaggggccaactgcaagctggttcccactactcagtggaaagataacatggaacattccgctatctaaccaaagstgctgcacaggatataaaaaagcctcaaggtacagatctgatagcaaaagagacagggaactctgatctcttcctgcaacattatttgaacwtccctgactattgagaacaatcccaactaatattggttaaaggaaagacaaacatggctctcaaaggataacataccaygaaggcctaggcaaagtctagctaagacgtgggctccaaataaggtttttagtgtasggtgagcatcaacttgctcaatayttgtgtggataaagctaggaggcctagctgccagagcagggtgctgggaacaatgacygagcacaagtacataaactaataaacaccgtagctttgacctctatatatgaatcaccatgaaaactgaggggtctgaatcagtgaaggcatcctggtggcaaaggtcaatcattatcagattgcaggaccrgttataatggcaataatacagcaagtgagtccatggaaacaacagaatgatyagaatggccttttttccccttcttctgacttgtraagaaagattgccttccttggacttaggaaaccccttagcttcttggaaaattcaaagaaggaagacacaggagagagccccaggggacawgaytttctgttaaactggacattacaagactcaataactaattagaaaagtcaggccaggcatggtggctagcactttcagaggccgargcagggggattacttgacctcaaaagttcaagaccagccagggcaacagagtgagaccttgtctctacaaaaaaaaaaaaaaaaaaaggaaaggaaaggaaaagaaatcaaagacatggctcyttttatcccatgcatggggattatacttagaataaaatgaataacattgagatccctagggataaakgtctcaaaaatccagaaaaaatctygcactctacttctaactaatctagacttctgcttgatttctggctaaaaggyagactaactcttcgctatttcaawctatctgaaccaaactrtgaactctcacctaatgyataagatggagtagttgcaattattttaaacttcaatttagcattaactggccttttaacataaacacttactttgtcaaatratgagaaatagcataatcttctgcatctcgtccacacatgtcttgagcgaagacatcaatattttgcttaagaaggatattgacaatacctggtgagtcatagtatacagcaagcatgagagctgacctaaaayaacaaagaaataactccactcaagaactttaataaagactttttwaaaaagctagtttgatacactttaccartttaatatccgcctgtcagtrtagatgtaataacyatttgcatgtactagcttgggtctataagcatctagggtgctcaagtgttcatctttgtaaattgtcaccaaggctaaaagaaagggacaacagggaagcctcttgtcccactggggtaagacataatacaagttgctaacttatagtcctttgatggccaagaaactgtgctgaggtcacttatctaaagtaggcaaagatttagatgaagatttccccattgctttcctagtcaaatcagctaggggtcagataagagttatctgcaggctgaaaacaacaacaacaacaayaataataatgacaatgctagtagtcataaactaaaagtccacactttaaaaatgaataaaacttgtcaggtgcagtgtctcatgcctgtaatcccagcactttgggaagccaaggagagcagatcacgaggtcaagagatcgagaccatcctggccaacatggtgaaatcccatctctactaaaaatacaaaaattagctgggcatggtggcgtgcacctgtagtcccagctacttgggaggccgaggcaggagaatcgcttgaacctgggaggtggagaatgcagtgagctgagatcacaccactgcactccagcctggcaacagagcaagactccatctcaaaaaaaaaaaaaattaataaaactaatacaaaaccctttagctaataaaagattacagtaccaaaaacatctgattataaataccaaacactgtatattataagagaagatgaatcctactatgtactattctttatgttactcagtccaaatatttgctggtctatctgattattcatggtgatatttttcattatatgccaataattatgttaatcttcttattaatatttctgacttgagtgaccactctagaatactcaggttttatttttaaaaaaagaactactgtaccgtctcagcctatcaacggcatgtgtacttgctttctttttcaataaaaattccaccattttctctttcttgcaaattatagcgaataaaagtggggtattactgtcctacaaaacagcagaaaaaaattaataattcacaaaattacatatttctcaactgaactgaaagtcttctctaggatgctttgaacttcaacatacaatatagaaaggaagtaaatgaaaagcagtcccttccttctcactcctctgtgctttctgatgtgctgcgctctgccttgcaaacaaccctcctctgtctcccyggattaactgtggtgattgccaaaactcactttaaacatttacyagtcccmagaatccttgctttgatcacagcacttakcatggtacattgtagtcatttcaytgtttcccactgaaaccaagagcttcttgaggcaagggcctaaaaccctaagacacagtagcaaatattttaagttttttacatwaattaatgatctaaattactatctctaaagcagtgtytcttaaactatattccaaagaatatttgctttatcakaagtattataccscaagagaaagactccatgaccatctgtatttgagaagtattacaaaactgtattttatgtccaataatcaagaaatctctttaatttyacctaatccccctttgacaatactatttgtggcaaacattaacatttgaggaattaagagtttcagagatacagttgccagagcttcccaatacaggtggcrgttycctctgggtggtacaaacttgcttgattcacttytatsaatggtgtcaggatcccagatgccaatgtcaggcactcctgctccaaatgggtcaccatggaaatgagytttgaattaagasagattgscttcaaatgcatttattttccttattattaartagtccatgggtttttcccctaatacaagagaagagatttttatctttactgttagaaagctcagtatattctgtgtaagagagataggtttaaaaaacttaagarsaaatattttaaaaaccaaaactcagtaagaaatactattctcaattataatggtaatcccgggaccctagtgcagctctactttttaaatccatttttactggcttccacttaaatggctacttaaaattattttttattttagacaaaatataaatyrraaataaaaacataatggcttatcaataraagttctcatactgatccayatggattatttctggcatwatacaagccaataagtcacttgcatcyttaaggaagagcactgaggagaargatgtactgtctgcaatattcrtaaattatccaactataaccaggaataacctaaaaaggcttctaggcattcttatgggcagagaattatttgtggtatatataaagaaaagagttaaaaamttctaaactctaaaattcaactccataactgagggatttatatactctatagactatatattataaacaaatacatgctgacttaaaaaccttgaaatttttatcaaaatatactataacataggagttgtaaactcagatacttacaaggacaaaggaaggttgcctgagtaagggaagtactaaggtgggcacagtagcaaactggagaatacctgccttctataaaggggcaacttctgcacagcagaccaaagaatgatagaaactcaggggacaccagatttgattttttaggataygcctgaagtccacatttcttcacgagtcttctaaattttacatgttgattcaacttatagaggaaaacaaacaaatctgtgtaccacattagaatayggcccttgtgtttttatattcgccattaatgtgttactaaatggttgtgtataatccaagtatttgcatgtaaaatattttctttctctggtatcatatgttctaccaaaaaatcaggctctcatatgtaataaaaattgctaaaamgactcacaatacctgcttcaagaatttttccaacatgtattcatttaaaatatgtttgtatataattttcccagattrttaaccaaatagataattggttcacaagactgctaaaactaaattattaaaagaattcctatctatattcttaktaacttcatggatttcagtgtttaaaactgacattttgggtatgctaaagttctataaacttaaacatactgagatagttcataataaaacttcaactaaaaaaaawagtttaggatttgctactattctaattgagaaagccmaacttgtaatgaacatttgttgacacataatcacctgcgtggtgacaaagggacatgaaatcatgaaagggtcagcctctacctattgaaagattacycataagcaaatttctgaagactctctgaatggtagtgaatgattcatggtgggaagsaaaacatgttattctgtaagctgagagatattgccaatgatattwcctttcacttcccagtcacagatgtagagaaagacagataagtcaggctaatatwattgaaaaggagaactttgaaggaagtggcaactatcaaatgccaactcttctagagatttcttacatttttgagatacagaaatttatatattgcacttatctattctggggtttttaatcaagagtgtatcccaaccttgaaggttttttgttwttttgtgtgkggttttttttttttttttttttttggctattattgttgttagagacaagagtctcactatgttgctcaagctggattcaaactcttaggctcaagctgggactacaggaatacaccactktgcccagcttcaaraaaacatttttaaacaygttcaggccttawtaggtctattacatcaaaatcttcaggggaaagcctacaattgtagatttttaacaaaatgtcctcaggtcactgtaatgcacaattctgaraatyagtgcagcaatcacttcagtctcacctctcacccacatggctaattcctttatcagttggagatgtggccaaaaagagaaaagagtaagagakagtgtcatttattaaaactccagttaagtttcctggctatgggtagaacagggacaagtaaactcaaaatcccacttgattttgctatttacaagctccttatctcccaccttcccactaagacattctagatttgagaggaggctttaggttcttatytaagtggctgtttctgccaggatgagcaataagtcagttaataatttgttccaccttctgctgaagtgtttctcacttcgtcaccacatattcactgccaatctrgtttcctcagagtcctcctaaaattcrtctctaggcaagttgcaaytcattctttttcaaaccaaaaattattagacccaaagctaaacagcaccttgtctaaacacataaaacaaacttaaaaaaaaaaaaaaaaacctcttcctggcatttcccctcattatctaatatccaagtgacctgcatatttctgattgctctctttctcccctcccatttttccctcttaagccttgccactgagagataatacatcagtttttcagaaaattagcagcagcagcagcatgtccactttttctaagttgctttagttttgtttgagttttaagataaagcctawttccagggaatattttctttcctgtgttgttttacactaattaagaaaaaaaaaaaaaaagaataaccctgtgtagaaaaaaagttgaaaaggttttacctttaacaaattcacaaatattttccaaagtgcattttataaagctgtgccctttaatgcttctttaaaagtatcaatatttaaaataaaatcttagacaattaagttatttcaaaataacttaatttgtatttgcattcagggaatggttgagcttccacatataaaaaattgacccttacctatgtcaatgttaaaacaaatattttggaaagaaagttgattgatctataccttgtccagtgcttcaatgtgtgcaccatgggaaagcagtttttctgccagtgaggtgctctcactatacacrgcataatggagagcagtgttgccgtagatatccttaaggtttggattggcgccatgtttcagcagaataacggcacaagcctcttcctggcaatggacagcctgtccgtgttagaycaagaaacagaytgtaaattccaagaattcaaaatacacattccacaggtttcaccaactagttayatgtaaatgagatcaatttattttaattctatatatgtaaatcaaatccatgtcatgctgaaatagttggctctaatatacctgtatcaaaggcgttctgttttctttgtcacagayatcaatctggcattttctgttaaccaggagagtgaccacttgcacatggccactggcacaggccaagtgtagagcagttctaygagagtaagaggattttttaagaaactgtagtacaatatctcaaaacatacaatcattcatgtaactgtaaaaattgaatagcatgtttttcctctgccttcaaaacaaataawttttttgaagaaagtacaatacttactagctcttattgctcactgccttaatgaaaacagcagcctatttgagtagaaagagctcagtctttggattccgttcaactagggcttgagtcctactttaagccttgacacttaccaactattgcttagcctttctgtrcctcaacttcctcattaataaagatgacaatagtagctatctcataggacaccatcgtkatgcttaaatgagaagctatgtaaagtatgtagaacagttcctacaacaactcaataattctaagatttttgttttttgagacaaagtctcactcttttgcccaggctggagtgcaatggtgtaactatacctggaactcctgggtcaaatgatcctccatccccagcctcctgagtagctgggactacagatgagcaccagcatgcccagctatttatttaaaaatttttgtagagtaagaatctcactttgttgcccaggctggtctcaaactcctggcatcaagcaatcctctcaccycagcctcccaaagttctgggattacaggtgtgagccactgcacccagccagatatwataattattactattactactaaacaaaaccattttaattaggtagaatgatacaattatacctactttgcargatgacttaaygagtaggtcacattttaacacctctgacattggaatgycacttataattcatgatttgttataactataattggtagcattttaaaaattatcttattgatatataaaatakcggggcatcacgcaatccatgagaccttacattaagtagaatatggtatactcagcaggtctagggcagttctargcatgyaactgaaacttaaatacattttagttcttaaaggtactatggggaaagagcactgaaataacaataatgcattttttaaacaaattaattctttgattttcaaacaacttgaarccaaaggaaactcatgattcaaatgaatacatatggctcattgtattcaatatttatacttagagaatatatgcaaataagactttccaatgattaatattagtatttaagactgataaactttcgaaagagcagttaaaggttatcttctattttctaacttcagaaatgcttttgtttgaaaggtgggagataaagtttcaaggagattaagtcccaatattcctattttaaatctctcagcttgtgcaggcgggrcaggtaaacatgaagtgtttaaggatggacgggtcctgagagatgrtagaatatgtctgctacatagcaggtactcaggttacgcttgatccataaatagaatgaaagaatggataaatacagttggggagttcaatatttttaaataaactcctataaagcaatatttttgcaatagtaattatttatatgttattttatttttaaagaatacaattaaaatgaaatgatcaatccagctttgtttgcataaatggaatgagtatataagaaaaacatatgtacataataaaatatatagataataaaatctggaaacagataaaaatattccctttttacttctgargaggctaaaagctcaaagaagataacaacacacacaataatgataaacaatagaaagtgagaaattattttcatcagcrcaagattcatattcctctcttcccaaggattattccattaataataaacttttactagaagttttgtacatgctcactgcagcaatcacagataagaaaaaggaaaaaaactttacttaaaatacaaatgctcagaaattacaaattttatattttgtacatatttttgctaaaacaagaccatagtatgtgtatgtataatttaactaattttttttcctcgctagctataacaaaatacatctttgcacatcaacgtacttctgtatctaytgccaccttcagtggtcacatattattccatcctatggatgcaactgaaatttatttataggatccattctatgggttctttttaaagtaagtactgtgaaaaataaagtgcatgtmtctttatttcctaagggtattttagtataatggaattggtgggtaaagggcwtacacaytttttaaatgtagtacttaccattttcaaatgagtactttgaaaagtaatcagcaacttaaactttaagcagcagtawaaaacatcctcacaaatattgtggatagaaaactgtttcattcctcttttaaattcttataccagaaatgcaaaggattttttcctatgtatataaataayttgtagatctggaaaaaggtactttgcccacttttagagtgtttgatgatttgatttgaaagaattyyctgtaaaatgaagatgtacttttcatctcatgtgtatatataactgatatatataacatatctrttatatatgtatacatatcagtaatatatatatatatatatcttaygatatataataaacaacataggccaggcgcggtggctcacacctgtaatcccagcgctttgggaggcggaggcaggcagatgacttgaggtcaggagttcgagaccagcctggccaacgtggtgaaactaaatatacaaaaattagccaggcatgctggcacctgcctgcaatccmagctacttgggaggctgaggttggaraattgcttgaacccggcaggcagaggttgcagtgagccaagattgtgccattggacaccagcctgggcaaagaagcgagactccgactcaaaaaaatatatatatatataatgaattccctataaaatgaaaacatacttttcatcwgaaaaaatatatatatataatatagtaaatatttttcaagtaagctctcttatctgacaacttttcgcccactgaaayaactcacggtatttttgataggggaacgagttctctcattaggcacctcctataatgtatataaaccatgttttaaaagcgtacgttaaaaataacaacgctgtatatgcttaactttgtgagttaaatcactcaaattctccaactgctccagccagagaattatgagggatggaaaacagctgagagtccgtttggctccgccgctccgagggtgcccggcgccctgcaaggccccgtcccagggtctgcggggaagccgggcctggggaccccctcccaccccgggctgagcccccgctacctgtgctgcttgtcccgggcgtccaggtctccgctsctgcgcgccaggcagcgctccacctccgcggcgtcgcctttgacagctgccctgtggatcttctgcaattcggagtcccggattcggtatccggaacccgtgtagacgtggtctatggagccctcggccgtctggcccctgcggctcccgaagccgaataacttcatggcggtgactacttctcagacccccaaccaccggctcttgagcgggggcagctccctgtcaccttttcaccacccccctcccccgaccccggccgacccagccccaaatcgcctatccaaccccaaagccccgatccaaccccaaatccgctatttcaaatctatgatctactccacaatccgcgatccagcccggtccaccacagccttcagcagcgacactggcagcctccgacctctcagaccgagtgagcctcgcaaagccgttgggcgcgcgcctgcaccgcggttgctgccrggctcccggaagacgctccctggcggcgcgcgccggcaggtarggctgcagctctgggcaggcgccgatgggctctccggttctcctgggatcgcccgggcggccccagaatcgcaggcgcgcagccagcccggcctgaggaggagggcctgtctggccttgcagcccgccccgctcctcctcggaagagagggtgctggcaagggccctccgcggccacctgagtggcttcgcggattgtctggctgaacgctgaggctctggccctggagtctgtgtggctagtgtaaggtagctggagaggcatggaggcagagtcaggggctgctccttcccccacccgccctcactgctgccagtgccacacgcgcrgtttgcaactgcagatctggcactggcgcaggatggcggagcttcccttggatggcctcagggccgcagagcgcacagcccacctggcctcaaaggtccgctcctcttggacacctttctggatcctgggccctggcgctgggcactctgtatccacacggatgaaacarcggctgctggcggggccggttgcctgattttgccgcctgggggtctggcctcaggatccacgctactggggggcgggcatggtctggagtgtccagccacttgctgccggtgcaccacgtctagactgcagctgcggctccgatgccggcgtgagctggcgggcctggtacctgatgtcctcagggtcaagtgcatcgccctcccacttgaggggttgctctgacttgkcctcctycaagaacgcaggggccgccggggctggctcttcgtggtaaccgggatggtactgagcagcaggttttcaccctggtgccgctgctgtgcggactgcctgacttgggcgcccaggcaccggccccagggtccgcgtggcaggtgtgcaggtagggtgagtggcgcggagggccgggggttgctccgtcatctctgcccgtgtgcaacttgcagttttgtgcagcagctgaggcgctggcacgggaaggtggagctcccctggatggcgtcaggtttgcgggcacagagcacagcccaccagacctgaaggtctgctcaggggccatagtggttgagttctccatggaaactgggatggggtgaamggccagttcccgtcctttggccgcctggccaactgccagacttaaccgctgccgcccaggcatctgtctctagcgttgctgctacttgggtagaagtgggggtcggggtggggcgtggagcktcaccggttgccaggccagcactgtctttgcaacatattcagatggcggcgggcagctcgggcgccagcatgggctggcggggctcccctggacggccctcaggtcgctcacagcattgtcccaggacttcctcsgcctgtgccaggtgggcaaggtasggggkagcttccaaggcttctatcccaactctacctatttctacctattttctcttgagttattttgcctttatctcagttttatttgcaaaaatagtatacgcaaaatacatcgagtgaatgcacatcaggcatatagaagatctggcagaaacatgttttctcctgcycatttccagtcagtatttgaacacagaggcttccacggttttgattctttccacaaaaggtkagttttgtctgttttcaccatttatgtaagtgaaactataaattatataatttttatgttcactcactaaacatgcttgtgacacatcattttgytattattcattaattttattttgtaatactcaattttatgactataccacaggtttgaggcctttgctattgatagacacaaaagcagtttcygatttgaggctatcatgaataaacctgctacgaacaaatcagatatacatgtttttctgtaataatattttcacttttcttgagtttaagtacataagagtggattttctgggttataaaataagtatatatttggcattgtatgaaatggggagacattttcctaagtggttgtgtcatcttaaactacaatgaaaatgtttgagagaatcagttccactttctaaccaatacttgatgatgtcagttgttttagtgttatccattcttatgggatataaatgctgagtagctgtctgccttcccccacaacacagaaaattgagggcctagaggacagtyttattttcatatttgacatcttctattattttttatagaagggtgatatgtgggtagtaaaattttctttcaattttctaggctgtctctgaatcttactggggttccttgtcctaaaccacattcagaaattttcacgaccgacttctttttatctttgtcataccaggccaatgagggatagcattcccgagacttaagtactttgtgtgtgtgtggtggtctaataatcatagccttaaaactttctggctgggcatggtggctcatggctgtaatcccagcacttcgagaggctgaggtgggcggatcmcctgaggtcgggagttcgagaccagcctgaccaacgtggagaaacccccaactctactaaaaataaaaaattagctgggcgtggtggcacatgcctgtaatcccagctacttgggaggcaggagctacttgggctgaggcaggagaatcgcttgaacccacgaagcggaggttgcagttagctgagatcacaccattgcactccagcctgggcaacaagagtgaaattctgtctcaaaaaaaaaaaaaaatttcagacttctgggagacactgaatttatgaatgtgtacagcatgtcacaataacttttttttttttttgagaccaagtctcactctgctgcccaagctggagtgcagtggcccatctcagctcactgcaacctctgcctcccggattcaagcaattctcctgtcttggcctccccagtagctgggattacaggtgctgcaaccatagctggctaatttttgtatttttagtagagacggggtttcacatattggccaggctggtctcgaactcctcacctcagatgatccacctgcctcagccaatgggtggattgttaactcaaaatacgtaccattgaatactgaggaaaaggtatagccatcatcaccagcagctgagatgccagttgagataccagaaatgccccagcacgtaactcctcttttaattcacacacacacacacacacacacacacacacacacacacactcatggtaaccacttcaggatggacacagaaacagccatattcttttttgggagcacattcccctatgacacttagatcctaatgctgactccaattccctcccgggacctcccctctccttacagcatgctgggctttcccttagaaaaccccatgtcatttcctgcaatggaacatccatcagcttcacccacagtgtctgcatgtctctgtccacagcaaatgtttttattactttaaaatatagatttttaccttaactggccaaagacttaggaccctttttccaagctcttttagatgaataaatgcaaatattagagatgtgtatatgtgtataaatatatggggaaaagatgttgcctagttgtacaaattagctttaacaaaactcctgattcaaattatttgtgagaagggcgattctaactcaacacaccaacaaaataaaagccttatccctctgctccsccaaaatatcccattcagagcctgcgcgtgtgtgtacacacacttgtgcactcatccccacctgaccgtatcaaattattatttaaactagatatttttactttgttgcatagtagtaatggtttctggaatgaaaaaaaaaacaggagaataaaactgtttaaatgtatctccgggtggacgctgtggccactgcaccaaccccgccggtggcgccgagtacctgcgtctcaggaagaggttctggccgggcctccgcctgaggccgcgcccctgggacctgtgcgaagtccacgtgaacgcggagcgcagcattcaccatcccctccctgaaacagcggtacccgaggcgctccacaggcagggccgagctgggcgagggggatctcagcccctgcacgggccgccctgagcrgcggggacgcaggaagaggtcgctggctccacccgcccctaccccagacgcgggacctcgcggccagcgaggacctggagcccccgccccacggctgccaggaggcggacaggggcagttcctggggggctaccgccccgaggccattctgccagaacttgagcgacttggcaaggggcagcgccccgcccctgaagaggagcctgtgtcctagaggcagcagcctgggagctcctccgaggaggacacggcacaggcgagtgactctggcggcgcagcgctggctttcccgtctgcggaggaggagagctgcggggctgggtgagctggacccagcagcacggctggctgctctyggcctccgatggggagtggacagcttagggggttgccctcgtgccagccggcctgctggccacgctgggcttcatcacctcctcacttgcctgcacaggcgcctagcaccgcaggccagagcttctggccatgctggtcaacttccccaaggagcctccgctgcccgggaacagcaaagccaggactagcaaggctacaccgccctgcacttggcagccatgtaccttggagatggtgaagctgctagtggggacctaggacgccaatgtggacatcagggactacattgggaaaagggcctcccagtatgtgagtcagagcatcagagaggagatcgagaccctggtgggagtcctggacgaggacgacggggagaacaccgccagcagcgagggtgggtactgttaagatttaaaaggtgccccctccatctcatcacctacaaactctcacacgtcctggaagatggggggaccctcttcaccatcacttcttggctgaaggtggtccagacgcgaagccaaggattccagggcacagagcctcgggcaggactaatggacttaaaaaacacaggctcaacaaaatccacttcacaacccaggtggttcacatcacaccctctttcagggacccagagcagccactggaagaggaggagtaggaacgctctcttaaaggccacttattctattccttcaaattaagaccaaagcccaatgtatttaggtaaaaataatttcttttagaaaatgctaaggtttgtcttctgaaatttaataacaaaaaaagaacactagatgtcagtaaggaagtgagaccagaaaagacaaactaaattatccttactaggttggaatggatggggtggagttcccatcaggctagcattctgggcaaagcgttttttttttgtgggtgggggggatggagtctcgctctgtcgcccaggctggagtgcagtggcgccatctccactcgctgcaagctctgcccctcgggttcatgccattctcatgccccagcctctgagtagctggtactataggcgcccgccaccacaccgggctaatttttttgtatttttagtagagacagggtttcaccgtgttcaccaggatggtctcgattcctgacctcatgatccgcccatctcggcctcccaaagtgctgggattacasgcgtgagccaccgcgcccggccggatttctttttaagagattcataataccttgacctgtgccccatttccctcctccacctgtctgacctggcgtccctatttcgggagaccagaagtagggggaagagaagggatgactgtttctttgctttcaccattcctggatgccatgcaaaggaaagaatattgcacttttatgtatctgttttattaagtggttactcttccaaggacaaaaaaaaatgcaaattgttacgaaactggtagtatttttaagtgcaagtactacatgctgccttgttcttttaccaattgcatttgcattttaatgtactactggtacagccatggttgagaacagtttggaggttcctctaaacactgaaaatagaggtatcacatgatccagcaatcccactgttgggtatataccccaaaaataggaaatgagtatatcgaagtaattatctgcactcccatgttggttgcaccactgttaacaatagctaagatttggaagcaacctaagtgtccatcaataacttaatgtattaaagaaaatctggtagatacacacagtggagtattattcagccctaaaaaagaatgagattcagtcatttgcaacaacatggaaggaactggagataattatgttaagggaaataagccaagcacggaaaggcagacattgcatgttctcacttgtttgtgggatctaaaaatcaaaacaattgaactcatggacatagtaagtactagggagctggggggggggaaggcaggggatgggtaatgggtacaaaaataggcagaaggaatgaataagacatactatttrataacacaacagggggactctagtcaataattgttcatttaaaaataactaaaagaatgtaattggattgtaacacaaaggatacatgcttgaarggatggataccccaccctccatgatgtgattagttcacactgcatgcctgtatcgaaacatctcatgcaccccataaatatatatgcctattatatactcacaaaaatgtttgaaaataaaaataaaggaactactgaaggttaggtcagagtcgaaatgcaaaaatactaattagagaataatgtgaatacaacaggaatcctgttggtgttctrtttgtattgtaaacagcagcagttcaattgttttgwcaaagcaatttcaattttaatcactgagctaaagaaatgggcaasactgacttccgtaatataggttccacctaaccatctctaacaccgctgtcaaggaggaccagtgttagggtacattattaacaaccacacaaatttttaaaagaaaagaacactcttagcagcctatggtacttttaaatgaactattgcctctcattctaattctcacttgtgttgccattctaaaagtwtgaatttgctgagggttatattctgggtattatataaccattggttctrcttggcataaccctactaaatggtgcktagagctgaattacctacagaaactttctggtttaattagcataratattagtgagcccatacttctgtgatataattattaaaccaacttaatgattctcacataaggtgtgaattttactaatgcattcataatctatgctttgtagcaacatttttcaaatgtttaaaatgctaaatcttctcaattttccaatcttttcttgaatctattagatacctatagttactgaaaagctgggtaacaaatacacctagttagaaatggcactgctttataaaaggcactcaagacgagactatttctatayttaaatgctgctggcaagtgaattcctttgtatataaatgaaagataccattcattaaratgaaagacktgttttaagtgtggttcttacatttcattcatgatagagtaaatggctttataattactttaaaatttaactcactagtatgttaaatctgttcattgcaagattagaatcaactgttagggaaactaatttaaacaagcccttccttagtcttttgagtctcatatttgctgaaagtacctacagcttgcaggataagggagttcacggaccacagggtgagtgaacccatgcacaaattgcaaactgcccaaagctacaacattcaggattttcagacctttagttttccaagtcatagaaatktgttacgagttcatcacatctttatctaaatggcaactgaatttctttaaagataggtttaaaaaaggcataaaactatgaactattatccatttgtgtgcctctatttttgctttagaattatggaagtggaccctgcgcatttgggaaacactgttatgcatacacatgggtgaaaaaaaatctaatattgtgtaaattaaaatactttttttgaagttgaaaagcatccatttgttctaaatctatatatattatgtgtatctagtacagaataagctgtaacttctcattgaggaatcttaggtttttacagatatgtaaagctaaaacaactctaaagagtagacacttcagaacaagaaggttctggtcaatgttgagagcagacactttcactgaaggttctggtgaaatgtgggtaactaattgctcgaaatctgtaatttgctatatagttaactattaagttaaaatgtcatttaccatgctttttacactaaaagctttaacttttctgataaaataatattttaaatgttcaattattacttctgaggaaagctacttctagcattctttgtcatgatgtgcttgtgtgcagtaagtggagcattttcagctacttacctctacattcttccagtttttcagtttctgatttagcttataaaaggcaaatgatcaatttaatttgatactcagaattgtgtttacctttaatggacaaatatatgtcagatactttggggtttattgatatgacactgtgtggttaaacaacgcaagtatgtccatgtgtttcttacagggtacacttgaaactartagtgtttatgcagctcacttatgtaacttgaaaatctggtactattgcattcaggactgaaatcttggagtttaggtgtcttgtctctcattttgaaagtaagtgaaagttgagaatgtaaaatctataaagttcatttttttaactaggaaaaaaacacaaattaatgacagaaaccaaattacaaatccaaaaakctcagagaacaccaagcaggatgaatatttttgaaayataactaggaatatcatattcaaactgtagaaaacctataacaaagataaaatattaaaataaggcagaggaagaaacatattgtctacagagaaacagacgtaagaattacattggacttctgtttagaatccatgcaagtaagaagtgttgaaaaaaattagaatacagtgggtatttattatccaagtattcattatctaaaactgcaaagcaaaaataattgtaacaagaacatattcactagcaatctgagcactcatgatattartgactgttctggagagaattatgtccccccagaattcctaacctgaagccctatctcccagtgtgactgtatttggrgaaggagcttttaagaagktaaaggttaaataggggcaaaaggttaaggccstaatctgttagkactggggtcgtcatccaaaaaggaagagwcaccagagatatctctctctctctctgcctccctcctcctctctccctccctctctccctctccccacatgcatttgttaatttgaggttttttgttagaacatatatagtggcattttaataaagtgttactctacttaaaacactcacacacacatatacatacaattttgataaattcttttttgagaataaggccaggcatggtggctcacacctgtaatcccagcactttggaaggctgaggcaggtggatcatctgaggtaaggagttcaagaccagcctgaccaacatggtgaaaccccatctctactaaaaatacaaaaaattagctgggcgtggtggcgggcatctgtaatcccagctactcaggatgctgaagcaggagaatcccttgaaccgagggggcggaggttgtggtgagccaagattgtaccattgcactccagcctgggcaacaagagcaaaactccatctcaagaaaaataaaacaaaataaaaattaaaaaacacaaaactgggatgtgtccctgtcttttaggaagatataactttaccattactaaaattgagcctcagaaacattaatcatgctacacaaacttagctggaaatggatactgaaatggaactttgaatccaagatgatttattttgaatcccatgctaatgccgttaactcctatagacccttctcaggtgcagccagagacacactagcccactgatggacggacagacgtggacagggtccatctcactaaaccacccaccactgccacagctgcctacaacagacacatcagatgagactccaggcaaatacataattttcactgaggacttattggttttaagaataggtcctggtgtagagaagtccctcaacctactgtgcaacatgttttgagaagcgggtaagctatatgttttgtggttttgtttcataaatgcatctacaagaagaccagtattgactgaatgaagcttttgtttaaagggctaaaatatgctttgtggttttatatgcagaaactactttaaacctaatgactattaattgtatcatagcttgtgatgtagtctgctcatggcttttaaggtaaattgtgccatgatccactgccattctaattgctttaattaacaagtcattaccacactactgttacatcttaattatgcatacagacaggtagacttrttttacatatgtgaactaatagttgtcaaagcaaatgcaaattgtattcygcaagtaaactctctctgaaatttctagggatgttctttaagtgaaattaatattcaaactgaagattttagttaaaagaactgagtgcagattaaagtcttgttgtgatttaaacatagtcaagagtacaactgtgatacttcatggaagttatgcaataaaatgtctctaacctgcaaacaaatctatcaagcagacggcacagtactgaatttgaaaccagaaatactgggtttttatataaatgcttcatagatttgttttatgataaagggtacataactctcctaaacctcacaccacctcttaaatagggacartaagtccacatcaacacgcctgccttagctattattaaactcttacartatgatgtaaagtgaaagtacaatgtaacatcattcctaggccaactttgtccagttttatacagaaacgtgccaacttttctgtttgcaaggataatatcaaagcaaacaccagaaggttgtatctttgrtgcattttttccaaatcatacacataataaaccaaagacaaatgatgaatattayttcagaaaatataaagtcttcccctttcttcttttgccaaggaagtctaatattttcaccatttttatgcacacaatcaactttatttaacctggaagttaatgtctcattgttttcattgttctaaataaacaccttttcccttgagtattgytctaaaaattttgaagtcgtctgaaaaattttgttctgatwtttcacrgttgtgttgatgatatgcgaaaaggaatacagatggtatttaattatgaacaagaaaaggtgttaaatatcattagtcattagaaatttgcaaattaagaccacawtgactaacacatrtatatcagaatagctaaaataaaaataaaacatcaaacgctgaggagyatgagtaaaaactagagctttcacacattactggtgggaatgtaaaatcgtacagctatgccaaaaaggagyatagtagtttcttaagaaactaaaggaactcaartccccaggcctgcagtctgggccaaggtcacaggccctggatcaatcaggatggggttcaagggccttcctggggccatccagtgttcaaggtgccctttggtggcctcatctgcccctccgcccctgagcacgcccctctgtccctccaatcctccctgtcacagggacgtctgtcacagagccatgccccacctcctgctttctggagatgccaactgccctccccatctctgggtcctgaccaaggtgytctaatggacaccccctgacccaggtctcagrgagctgccagcacsmtgggtccctraagctgagatccagcaagacacatgtggcctgagrgtcccactytctggctggcagaacccagaggtgggagcacactggagtgtccttcagggcatcttcaccccatgagagkgctgggggctttgggaktttgcagctggcaggagtgagggcccagtctcctatctctgatgcgtccttggtcaaatcctgtgcctcagcctgcagggcctatcgtggtcaccacatgaatgtgttcccttagtctgggagccccaagcaggcagcaccccctgccaaygacttcagggcacytggaagtggaggctgagaagtctcccacttcgcagagctgggctctggcccagaggccttcycgttggctcaggtsrtctctcgggctcctggggccacaratcaggggacaaacacgggcagctctgctctgctctgcctaaagagaggtgcccagtgaatgcaggttccagacaaaaggtggagcctggcatcctgccctgcgtgtgggctccagcctgmtgccatctggggaaactgagtcatggcgaggctcgaggatgtttctcagaccacaccagtccctgaaggtcccctgacctcccaattttgatggacartaagaagagsttcccaggccgcctgccacaggttctgactcggcctgggttagggtaagtctccgggctgctgtcctcaaaagccccatcaggaggctgtgtcaggccaggcgcaccgtggtgacagcwgcatggactgagggttctggccgcgggagaggccaggacggggggaggtcaggtccaggaggagggcactggccggcacatggtggggctggagagaccctgggcggggtggtgggaatggcccaggaggagctccggctcctgtggctggagtgagggtgtgggctgtggtgggagagggggtgaaggtggagagaacaggggcccagaggtctgtgctgtaggaagggtatggacttcctagtgaggactttctggtggggggctctcagagaagaggaggccggaggggctgggggtccccaggactgcatgcgccaggcagacggaggggaggccgagccaggagccgcaggcttctcagtgccagaccaacgtcgccctccgctggccgtgtggggaatcgcgcctaggctggggctcccctggccccaggttagggggactccgatgtgtcctggggcgcttcctgcccatccagcctccgccaggcagcctggccctgaatggctttgagggcagcctccgcagcacaggacctgcctccgccctgtggggcagatttgggcgtctgactctggacacttacccagaggctgaattcaactccccagcgaagagcacactcagactccctccccgctgtgcccagcctgaggggaccctggcttggacttgggaggagaaggccagaggccagggcctggctctcaggcactaggtgcaggagaaaatggagcagagttcctgcaggaactgcctcagactgcccccgaggggacctggcctggaaccctccctgtgctaccaggctgctgttggggccaggagggcagggagagcagccacctgtacggcatcaagtaacactatcagtcagcacacccaacacbcacacgacagccacagccctctgccctgaggtggctgcaactgagcagagtctcctgtcttgttcaccctgagcgcggagctccrcacaggacaggatcagagygcaaaccaggaacaaatggatgaaccaaggaagggrccagggcagtaggtccccacccacaccctgaaccctaagggtgggactcagaggctggagacgggctggccccargatcctctaagtgacaggaacccttggccactgttgattgycccgaggcggggacagggatggtggggctggggctgcctggccctttaagagggcagttctgcccaccaccctgaatgcccctcccctagctactggagaagagatcccgtttcttggcaacaggaagctcttggtttacacagtgtcacccaagcgactgggagccgcgtcctgctctgggactgagccgttggagctgcccsgctgaccgcactaggctgaccgcaaccggctgaccacacacagtcctcactcccctggccctggtgggcggcaggcaccatggcgcagacagtgccgccctgcgagctgccctgcaaagagtacgacgtggcccgtaacacgggcgcctacacgtcctccggcctggccaccgccagcttccgcacctccaagtacctgctggaggagtggttccagaactgctatgctcgctaccaccaggccttcgccgaccgygaccagtcggagcggcagcggcacgagagccagcagctggccacagagacccaggcgctggcgcagcgcaygcagcaagactccacgcgcacagtgggcgagcgactgcaggacacgcacrgctggaagtcggagctgcagcgtgagatggaggcgctggctgcggagaccaacttgctcctggcccagaagcaacgsctggagcgcgccctggacgccacagaggtgcccttctccatcaccactgacaacctgcagtgccgtgagcgccgcgagcaccccaacctcgtgcgcgaccatgtggaaacggagctgctgaaggtgccagcacccttgggtggccgggatttgtgggcgcagagaggaggagcccccccccccgcagttcatgtggacaagccacgtggctgctgcaagcacgcgggagcccagccctctgcacgtgagacccctgagtcccgaaatctggccccttagtgacaggaggcagctttgccccagaagacccctgacttccaagcagctgtttctcctctcctcctctaatccctttgagtcctggcacagtcatcctgaccctgggctccctgggmtaagccacaaggcacctccccagagaccctccctcgctgggacagttgctcccaaggtggaaacccaggtctgggccagcactgcaggtgtggacaggtaaggtggggtgggctgggagccactgctcccattcatcctatacagagccggggacacaaagatctgcacccacaggtcccctctcctccatgtcccctataacttcccaatccaccccagcttgtctgtggggcagccccacagggtgagagagtaactcagtcctggcmcagatgctggctctggagaattctctgacctctcagagcctggggcctccrtgagaaccactacaggcctgtagacattcgtgaaagatgtggggtgggggcagctggtctcctgccataccccaagctcaggcaagaacccttgagtccctccctcccctcatgccttccctcctcccttctttacccttctgcaggcccttccccctgcactctctcagtgcctcaagaactcctgcagctcccgcaaactctctgcccgcaacaagggcacctgccaactgatggagacactgacagtgcacggagaggcaaacccagggatagaggggcgcaggacccgggccctggcacacaaggaagtacccagtggttgargcaaagaccccaatcacagagaaaaggcttgttcctacacacagcaaattaaactggccaggcaataagaagaaacayagggtccttctcctgttcttggtgtgaagatggcctttcccagcacagagccctgaggggcagcctgggcgrgcatctgggcccccagagtttgggtcctcaggggctgtccagaggccaagggcaggccaacgttcccaggtgcactgagtgagcagcagcgatgactcctgaagcctggggcgtgggaactgccrctgagggaccttcccagcagcccacagaaggccctggaggaaaacaccccacttacaayrcaccaaggagaatgcccaamagcccaagataaacccagtgagagagcagaacttacacartcagagctcaggcccggcattcaactccttgtggttgctmaggtgttgacmaaggcctkcagcagctgggcctcctgggatcctcaccagggactggctctggtgctcagggcgtctcctccctcaggaagccgagctcatccggaacattcaggagctgctgaagagaaccatcatgcaagcagtgagccagatccggtgggtagagggctgcccaagggatgattcctgaccctacccacagctggtcctggggcaaggcattgaacgacaggaccctgagactcagagccagcaggggctgccccaggtcacagtggagcgcaggactgggtgggggaggttccggcgcagcctgaggttgagtggccagagcccagtgccacatctgatctgcagcctcccagcctgggccgcagctcctggtcactgctgagcacgagggctgcccgggacaggcccacccagaactccctcctgaggcaggcattggggcccagcctgcagcacagagggtccccagcagggccctccctgggcacacatcaaggccctgccccaccccgccccagactgaaccgggagcacaaggagacctgcgagatggactggtcagacaagatggaggcctacaacatcgacgagacctgcgggcgccaccacagccagagcaccgaggtgcaggctcatccgtactccaccaccttccaagagaggtgggccccagctctgcccctgcacttgccctggctgtggtctcgcctccctctgcctgggggccccagcggyrctgctttcaccagcctggcccggaggccctcgcccccgagggcacttgggcaactgtctgcccctggcatgagcaagcgaccaagacctcctcaaatgtccagcgcgtgcacagcctggctgccggcagacaggacagagtagggtggggtcagacccaggcgctggcaggattgcgtttccgcccaaggccagcagagggagcctgaccaccgcccactagagggcggcaaactcctgggagcaaaaasagggcgcgggsgctgggtactagggaaggggggctgcgggggccggaggtgctgcagagggggcctccggggcagcggtgctgggaacggggtcgcgggggcacgaggggactaagtgcccggggtgggtagggtgtggggggactcagagaagttgtggccagggggcactcgggggcagggagcctgagggactgggcttygtgrggcagcatggggtgcatcggagtccatgcacgtcctccaggagcatggggcgcggacagggcatgggggcgcagcagggctcccagccttcggcagagcctccccgaccctctcctggctgtcccccgccccgcagcgcctccaccccggagacccgggccaagttcacgcaggacaatctgtgccgtgcccagcgcgagcgcctggcctcggccaacctgcgggtgctggtggactgcatccttcgcgacacctccgaggacctgcggctccagtgcgacgccgtgaacctggccttcgggcgccgctgtgaggagctggaggacgcgcggtacaagctgcatcaccacctgcacaaggtggggcaccctgaaccccgaagacggccccctctcatcacctggcctgggccctcaacacctttctcctctgtcccatttatcccgagggaycccagaagcaagtgtctcctctccgtaaacctatgtaaaaccaggtgacactgggtatgatcgaccggtgttgccacccctatgactcagcaggaggagctgtggggaggatggaggcaggaggtggtctggggaacactgaccgcccgggaggtccccaagagtcctggcctggcaggcagggctctgaatctagggtctcagcgtggcctttaccacctctgagtccccagtccttgagcaggattcaggtcctggtgaccaccaaggatgggggttcttggaccacagctaagggacaacaggcttcctgactctccagagcccactgggggccccgtgcacattgttcccctcatccacgcctccccagggccactggtcaggactgccctctggacacagccccaagacctgggtaggaccagcctggtctcygcgttctatatacccgggcatgggggcacaggcccaaggagaactgtcctgtctgcagacactgcgggaaatcacagatcaggaacacaacgtggcggcactgaagcaggccatcaaggacaaagaggcacctctgcacgtagcccagacccggctgtasctgcyctcgcaccggcccaacatggagctgtgccgtgacgcagcccagttcaggtgctgcctgggcctctgaggcagtcccaggtggccctgtccacctcctccctgtgactctctccaataaacactccaacaccccgcacacacatcccccgcaggtgctgagaggggagggagactttggggccacacacaacaagcaggcatgccttaaacacacagacatacacatgacactgggcaggtcatgggtcggggggctcccagtgccagggacctgtgcccacgtggtctcaccccaccctatgctacctcatcttcccgggaggaagctccttcagacaaggtgagctccaggaggccacagagccagagaggccaggcagggccattccctgctgccctgagsgtgctgtccacacctctggtgggaagtatgacctacgcctgcgctacaggcatagatgtgccgtccttttgtttcccttgataacggatgcccggtggccccttctaagtacctttcttctttccctgcccctcagttccttcaaggaactgggggcctccttccatcaagtatcaggaatggaaagaactgagcctggtcggctgaggccagtcctgtcctgccagggtcgagattgcacacgggtcactcattcccactcaggcccaygctccctgggaggaccctcgtaatttatgctctgccctagagctgctttcctgatggggttctttcatggagtcttcccaggacctcctgccagctcccattgggagttttgggtcccctacaccccggtaggtgcatacttctgccctccctagccccggctcacacccccccaacacccccaggctgttgagtgaggtggaggagctgaacatgtccmtcacagcactgcgagagaagcttctagaagcggagcagtccctgcgcaacctcgaggacatccacatgagcctggagaaggacrttgccgccatgaccaacagtctcttcatcgaccgccagaagtgcatggcccatcgtactcgctaccccaccatcctgcagctggctggctaccagtgagcagcggcacggtgcttccccccagtcccccaaataaacagygcgttagctttctgcacagtgtgtgtgtgtgcmcggtgggacctcgagttgctgtccatctgaactggcctttgggtcccctgtgaggctggctctgcctatggactcatcatcctaacagttggagatgaggggtcagagccagaaccaggaatccctgtgcctgagaggacaggaagtgcccaggtggggactggggctccacagcacagctcaggtgtgggcgcagacggtgtgtccagctcagagccaggccatccagctcctccctccccacttccccaccagtgctggctcctccattccttcaccagggtcttaggaccatgggacatctttgggacctctgcatctccccaactcctccccctgcacctccaggcccccagcctcagctcacatactcctgtggacagggcgcttactctgctagaagcttgtctggctgctaggtgcacctgctggggtgatcctccaggcaggccccacccagaagcgcccgcttcagcatcccctctctgtccccaatgacagtgtgtacctgagctcagcccagcccagctctcagtgcccacgacccctgaggctcagatgggcagatcggcaggggtacatggagttccctcctgggtgtaggcccagtgtggggagaggggcctgagaacagcccagagtgggcatccacctggagagcatgtgggtgggggtcccatctccaacatccaggcccacagggctcttgtctcagcctggaggggaccaggaggtaacagccccttcccccaatcaaccacaaggacacccagctgggcagctctgtgagctgggtggggtcagccaggtggaagttgctgctgggggttgctgrgaggagaggcatgggctgcctttcacgtggggctaactcagacctctctccccgacctgctaggacccctccagaggccactgctgaacatgaaaaacactactgctgttcactgggggaggtgataatgttgactgcaggcagttgcctcggggaggagccctcttgggaatcttactcagcctggatggggagaaatctggaagaggctgtgtgtgagcaggcagtgcagggagggcttcctggaggagggagcctggcttccaccgcacaggccaaggcacaggggctgggaccagggaaggaggtgtctgggctgggtctctcgytttatctcgctctggttcactgcaataggctcattgctaaccaggcccgtccctccccagctccaaacccgactatcaggcagggaggattcttctacccacctggccactctcggagatgcagacccagaccctggagggtgggcccaaaagcttccaggaccttctctccagtgcagattcagggggaaatgtcacttcctgtcaccacggaagccgcactactacttgtcgcaaaccaccagtcactacagtaacacccaagcccactcttattctttggggtgccatttaaattcgccctggatgctgttaccatggggctttgacagccaggagcagaggcagtgggacacagcagccaagcctcacctgggggctgcagacagttcgtgtcctgtccatgtagctcctcaaagctgctccaggacaccaggcaggagctgaggcaatgacctgcccagggaacaccaaagaaccatctccctgcaatcacccccagcacagggaaaacctgtagtgaagcagatggtggtgaactcaaaggcccctgagctggggggaggttgttgggtgggggcttcactccctgccaccctagacacgatggccagggaggggtcaggtgtgtgtgggtggtggctgcagagccctccctgcctgctgcagggggatgcaggtggtccaacaccatcctgggcctggtcagccccggtgccagcctcagcacagtagcgaggagtcccccaggagagccaggaacctccatgggaggtgggtgggggcgaggcccccccatgctgtgcccaccccagcctcagagggagctgctggcactgtcccctcttgagcagcagcgcttttcccggactctagggaagtagccattaagaggcccaagaaacaatggctccctccatgcaggccccacactcaggctcccattatcgcccaggcccaggtggcactgcccagccctgtcgggtcctcatcaggctcaggacctccttgtcccaccctggagggggtggctgatggagagctgagtgtggggggtgccagrggagggggcctgggagaagtgtttcatctctgatgccagatggtggcaccaggctaggaggcaccgagctaggtgccatcctgagcacatggcaggttttaactccttcaggcctcatgacagcctcactatcacatgcattttacagcagggaaaactgaggcctgagggtccctgcgccmactgtgctcccaccccagtaacaggttgatgcaggggaggctaatgacagcagtgatgtacgtcactcccagctagagagaggccaacgcccctggcctgtaagcttcatgactcagtgcagagccagcacctggggctgctgggccagaactctgagggccgtctcctcatgctgaattccctactgacttccagattgtccaaccccaacccctgaggccatctggacagtggcagctgctgctaacccacaggcccctctgtggagtccctatcggcctggccttgagctgctacccatggtggagagcaggtgtggcttgctccagccaggaagcctctgggctcctggggattgggagagtggccgggggtgattcagacctccaaagtgggcaggaaggtggatggcccacactgggctgttctcaggcccctctccccacactgggcccacagcccagccaccctgggcttctagcacaaggataaaggaggctccagcagctcttgcctggaaaagactgtggtacctcctgtccccgacagttcagggagggaggggttgctgggggctgctggcccgtggctgttactgaccgggtcagggtgggaatggagaggtccaggccctgacatctgcggggtgcaggtgggatgtgccccagctgcagcatggccctctcccaaccccagcctgtcctgaccctcagtgacccacaccctagagtcagagctgtgttctgtcctctgcggaatccagtggagcctggacacagctgcccccctccgtgttggggtcaccctcggctgtcccacgtcggggttccctcatctgcccccttgtgcagtggttcctagagatcactctcacaagcatcacatgcatggctcaaggtcagcaccagtgcccctggtgcagtgcccgctgtccagcccacaccggccaccctggggggcgcagtggagcctgcggtaacaggagcctcgctccttcaggccccactccccttccacacaggctggccgctggactgaggctcatgggctgcctgccttgtgctaaaaatggatccccagactttctgggtttaataatacaatcctgacctccccagggccctccccattttgtgggagcaccccaaacatcttccactggaaaaataggccacataagcccaggcatccaggagcccaaggtctgatgcccagggagggaagggctttccaaggctcttcccccagtgcccagcacccctgccagcatcccacagtacagtgggggaggtgctgttgggtgtccattgggagccagccccaggggcacaatgtacagcagcactttcctgtcgtcatggctacactgcagccatgagtgaccagggctgtttctgtccaggagacacgctgtcccgccccgtacactcaccctctgctctccctgcccaccctactctggcctggcctggggtccccgagcctcagtggctcagccaccagccccgccagctgcctgcccaaacggatgctccccaggccacccagacccgagggactggagagagctcttctcctggccattcaaccacccctcagcctccctccaccctgccctgcatttggagagtctctgtgacccatcctccacacaaggaactcacaggaatgcccctctcttttcagggacaggtctgctggcatcagggagcattgagggaagcacatggagagggggactggggtcccccatgactgtgccccagcagcctcccccactaccttccccmayaggggatgctcccagacacttctgagctgccatrggtgcccatttcacaggtagggaaaccaaggctcagatccagggagctgcatktatgtgygcmtccaccygtctttctccacaagccccaggagctcagggrcaacaatggggactatggggagcccgtgccctgcctgccccaaccctgccacaggcccacaggctccccctggggatgtggctgcccacctgcgaagctgtgtcctcatcactcaggtctgagctgtgcagagctggttccagtggctgcaggaaccacagtcgcagacctggaagaagcaaggatcctccccaagagtctgcagagggagcgcatttctgcccacaccttgattttggacttgtggcctccagaactgtaagagaataaatttctgatgttgtaagccatcactacagcagcccgcgaacactaacgtagctcaatacgtccaggctcctctctctgtttgttgttgttctaggtttttctgagacagggtccggctctgtccctcaggctgaagtgcagtggcacaatcacagctcactgtaacctccatcccctgggctcaagccatcctcttgcctcagcctccccccacagctgggactacaggcagtgttgccatggctggccaacttttaaattaggtaacccttcccaataactttcacgattagttaacatcttctaccttcctatttattttcccctttttaatacaaacacatgcccattaaataagcaaaataggaaaaaattttaatcacccaaagccctaccatctacttaccagagagacaataatggcacaaggatatactgccaaattacactaacttttagtaatccaaagcaatagaaaaatctccagttttcaatttattcttcttagatttctaatcaagaaaacctattttctatactaatgcaaatacatacaaaaggaaaagacacacttatgaagcaaagggatgaactggagtcctaatgttacgagaggctggtagtcatttatttgtcatcactgaggtattttcagaaaatagccatggttcccagaactttaacaagcacaatgatccactcttagatacttgaaagtcagataagaagacatctatcccttaactagttgttatgcactatatgtgaataaaaccatataatttaaatttcctcaattaattctcacagacagtacgcaacctcacatcaccatgatcttttacataaatgtcaatgttctattgtaaatcgtgacagactatctacatagaatactcatgatttacaatttgagattgtcaacccagccagtaacctgtgtagcactgaattcaaataccagaaagaggacccagattccctcaccacctagcagagctcaagtgagctacacagcccggtaggaaatggggactaagtaaaaggttgtaagcaggtactactatagtcagatgagtttttgacaggttattctaaaagcactgagaaaagaaaactgttgtaatattccagataagatcacttggtctgtaaaaggacagtgtcaaggatatagaaaagaaccatcaaggaatttcagagggtaacctggatgtgattatatagtaccacatcaaatgatcatcaagctcaaagaaggcacaggggagcaggaggctgctttccccaggtactgtctttcccaggcttgcccagcagtcctggaaactgacatacacacacacacacacacacacacacacacacatatacacacacacacatatatatacttgttctttgccatctgatcacactagaaatgcctgaaaataaaccagttccagtattagtacaaacactgtgactagtgtcctgaggaccgctttgattgatctcattatccctgctttctaatctaacctccatctcctgggctcaagccatcctcttgcctcagtctcccccccatagctgggactacagggagtgttgccatgtattaaatattaaatctgaaaattaagtgagaaaagatttaaagaatggcaaaaagagacaggaagagagattttaggatgttactgctgtgttggtaagagataaaaaataaatgtcttcctccagcgtggcaatacctcaaggatctagaactagaaatatttgacccagccatcccattactgggtatatacccaaaggattataaatcatgttgctataaagacacatgcacacgtatgtttattgcagctctattcacaatagcaaagacttggaaccaacccaaatgtccatcaatgatagactggattcagaaaatgtggcacatatacaccatggaatactatgcagccataaaaaaggatgagttcatgtcctttgtagggacatggatgaagctggaaaccatcattctgagcaaactatcgcaaggacagaaaaccaaacaccaccatgttctcactcataggtgggaactgaacaatgagaacacgtggacacaggaaggggaacatcacacaccggggcctgtcatggggtggggggaggggggagggatagcattaggaaatattcctaatgtaaatgatgagttaatgagtgcagcacaccaacatggcacatgtatacatatgtaacaaacctgcacattgtgcccatgtaccctagaacttaaagtataataaaaataaaaaataaaaaaaaaagtcttcctcaagtttaccatcaaaaagtgctatacatgatttgcaagtattttcttccatcttgtgggttgtcttttcagtttcttgatggtgtcctttgaagtgcaaaaatgtttaattttgatgaagtccaattcatcaatttttattcttgttgctggtctcatatttaagaaaactttgccaaatccaaggtcatgacaacttactcctgtttgcttctcaggattttatagttttagtccttacatttatgtggattcactcaaaatggatccatttgatccatttttttttttgcatcgtttttgtacatggtgttgggtaaaggtcctactccaggttttgcatatgtttacatatctagttgtccctgggccagttttcaaacttctttccccactgaataatcttggcacccctgtcaaaaatcagttggttatatatgtatgggttcatatctgactgtcaattctatcccactggtctatacatctacccttctgccagtattatattgtccttattaccattgtcttgtagtaagttataaagtcagtaagtatgagttctcctacactgttcctcattttcaaaagattattttggctattctcagtcccttacaattccatatgaatttgagagtcagcttgtcgattttacaaagaactcatctgggattctgacagggatgaagttaaatctgtagatgagtttacggaggactgccatcttaaatgttaagccttcggtccatgatcatgggatacttttacatttatttagatcttctttcacttctttcgacaatgttttatagttttcagagtacaagttttacacttcttaaatttattagtaagtattttattcttgttgatgctatgataaatgaagttgctttcttaatttcattttctgattgctcattgtgagtatgtagtactcagttaaagtgtgtcaaatactattgatttttgtatattgatcttgtatcctgcaaccctgatgaacacaagggatttgtatctagaatacatatggaagaattacaattcagtaaataaaaagacgaaacaacccaattagagatggataattcaagaatggataaacaaactgcaatacatgcaaacaaatggaatattattcagcaatttgaaaaataagctatcaagccatgaaaaaaacacagaagaaccctaaatgtatactgctaggtgaaagaagccagtctgaaaaggatacatactacatgatctattacatgacattctgggagaggcaaaattagagagagtgaaaagatcagtaatgaccgggggtaggagaaagaggaggaggaggaacgaatcagtggagcacaggagatttttagggcaatgaaattgttctacataatactgtaatggtgggtacatgacattatacatttgtcaaatccaaaaatttatgaaacacagagtgaaccctaatgtaaactatgaacttcagatataagtatcagttcatcaaatctaataaatgtagcacagtaacgcaagatgttaagagtcgggaagactgggcgggggcattgtaggggagcatatgtgaactctctgcacttttctattttttctaaaactgctaggaaaaaagagtctactatgtttttaaaataaaatgatccctagcaggaaaaaaaatggcaaaagatctcaacaaatatttctccaaagaagatatacacatggccaataagcatgcaataagacactggacattactgtcaccgtgaaaatacaaatcaaaaccacagtgagatacaatttcacatacattacaatggctacaattaaaaagtcacagtgcttgtgaagatgtggagaaactgaaattttaatacaccgctggagggaataaaaaataatgcagccatttcaaaaagtagtttggcagttcctcaattagacagttatcacgcatccgagcaattctgctccagatatacaccaaagagaaatgtctacacaaaaacttgtacaccaatgtttatagcagcattattcgtaatggccaaaaggggttagcaatgtcctaaatgtccatcaactgacaagtggataaacaaaatccagtgtatccatgtaacagactatcattcggccataaaaagtaagtactgatacatgttatagcatagacaaatcttgcaagcattatgccaagtgaaagaatccagtaacaaaagcccgtatgatatataatcccatttatatgaaacacacgcaatagggaatccagagacagaaagattggtgatttccagcgctacaactgcgggggtgcagatgagggatgtggagagatggaattgaaagctaaagggcacaggaggcagggtgttgtggtccatgcctgtactcgtatagctactagggaggctgaggtgggaggatcatttgagcccaggagttcaaggctgcactaagtatgattacaccactgtactccagcctgggctggttgactgagcaagaccccatctcttaaaaaaataaataaataaaaataaaataaggtaaagggcataggatttgatttggttttttttgaggtggagaaacaattctagaattgattggaatgctggttaccaacatctgtgaatatgctaaaaccactgacctgtatacttcaagtgggtgaattacatggtatgtcaattaccaataaagctgttttagaaatcctagtatttgctgtgctgttactgtggcaaagtaccacatggcaataattgcacagccagccctaccattacagtatgacacaggaaaacttaaaactgcacttgcgatcaagctagatgcagagcatattagcacagcaaaaaataaatgactacactaaagacccatccttcaaggattacagaatttaaatgctgaaaaggagagtacaactcctctgtttttttaaaaaaggtaagaactcataactcagtcacttgtaaaattctggattgctaagagattttcaaatagaatttaaaagaaaacacacgaccaagacaataatgaaaatctatagataaatttactattacctttagcttctgaacatacagccaaaaatccatcttctgtcactgctttaaacgaaggtctgactcctcatgtatctctgcccaggaacactttcttattggcagaatccagtaaaacaaatgcaaacacaccatccaacacacaaattgtttgctcaattcctcctttgtcataaagacgaaggattatctcaccatccactttggtctggtattcaaattcaaaatagtgttgcaccttaggaagcaatagcaaaaccaaaacgttatagactccttgtgcattcactaataattttttattgcaaagttgcttcagtatttctggagctctaaaattatttcatgcactttggtgatttaggagaatcatagcattatccaactagggtttgcttcaactcataattctgcaaattctgttcaacataaggctgaacccatgaaagttttaggtgcagtctgataaac

SEQ ID NO: 97078 - DNA, 22324 bp, Homo sapiens
tccaaaagaaagaaaatccatataccaaagagatgtctgcactcccaggtttgttgcagtactcttcacaatagccatcatttggaagcagtctaagtgtccatcaacagatgaatggataaagaaaatgtggtaccaaaacaaggatgccctctctcaccactcctattcaacatagtattggattcctgtccagagcaatcaggcaaaacaaacaaagggcatccaaataggaagagaggacttcaaactgtccctgtgtgcagatgacatgattctgtgtctagaaaatccatagtctcaggccaaaagctcctttagctgataaactacttcagcaaaatttcaggatacaaaaatcaatggacaaaaatcactagcatttctacacaccaataacagtgaagccaagagccaaatcaggaatacaatgccattcacaattgccacaaaaagaataaaatacctaaaaatatagctaaccagtgaggtgaaagatctctacaatgagaactccaaaacactgcttaaagaaatctgagatgagatgatacaaacaaatggaaaaacattccatgctcatggataggaagaatcaatattgtttaaatggccatactgcccaaagtaatttacagattcattgctattcctatcaaaccaccaatgacattcttcacataactagaaaaagatgtttttttcttttttctttttttttgagacagagtctcgctctgttgcccagtctggagtacaatggcgtgatctcagctcactgcaacctccacctcccgggttcaagcaattctcctgcctcagtctcccgagtagctgggattacaggcacccaccaccgcacctggctaatttttgtatttttagtagagactaaaaatctctactaaaagtgggtttcgccatgttggccaggctggttttgaactcctgacctcaggtgatccacccgcctcggcctcccaaagtgctgggattacaggcatgagccaccatgcccggccaaaaaaactattttaaaattcatctggaaccaaaaaaaaagagcccgaatagcccaggcaaccctaagcaaagagaacaaagctggaggcatcacattacctgacttcaaactatactacaggactacagtaatcaaaatagcacagtgctgatacaaaaacagacacatagaccaatggaacaaaatagggaacccagaaataaggtcatacacctacaaccatctgatcttcaacaaagctgacaaaaacaagcaatggggaaaggactccctattcaataaatggtgctgggatatctggctagccatagacaaaagattgaaactggacccctttcttataccatatacaaaatcaatgcaagatggattaaagacttaaatgtaaaattcgaaactataaaaatcctggaagacaacacaggcaataccattctggacataggaatgagcaaagatttataataaagatgccaaaagcaattgcaacaaaagcaaaaaatgacaaatgggatctaattaaacttgagagcttctgcactgcaaaagaaactatcaacagagtaaacagacaacctacagaatgggagaaaatatttgtaaactatgcatctgacaaaggtctaatatccagaatctctaagcaacttaaacaaatttacaagaaaaaaacaaccccatcaataggtgggcaaaggatacaagcagatacttttcaaacgaagacatacatgtggccaacatgtatatgaaaaaagctcaatatcactgatcattagagaaatgcaaatcaaagccacaatgagataccatttcacaccagtcagaatggctattattaaaaagtcaggccaggcacagtggcttatttctgtaatcctagcactttgggaggctgaaatgggcagatcacttgagcccaggagttagagacgagcctgggcaacatggcaaaaccccacctctacaaaaagtaccaaaattagctgggcatggtggcacacacctatagtcctagctactaaggaggctgaggtgggaggattgcttgagcccaggaggtcgaagctgcactgagctgtgagcgtgcctctgtagtccatccagggtgacagagtgagacccagtctcaaataaaaagaagtcaaaaaataacaggtgttgacaaggttgcagagaaaagggaacacttatatactgctggagggagtataaattagttcaaccattctggaaagcagtgtggcgattcctcaaagagctaaaaacagaactaccattttacccagcaatcgcataactgggtatatacccaaaggaatataaattatctaccataaagacaaatgcaggccaggtgcagtggatgcctgtaatcctagcactttgggaggccgaggcaggtggatcacttgaggtcagaagttcaagaccagcctggccaacatgatgaaaccctgcctctactaaaaaaatacgtaaattagccggaaatcacttgaacctgggaggcagaggttataatgaaccgagatcacatcactacactccagcctgcgcaacagagcaagactccatctaaatatatatatatacacacacacatacatgcatgtgaaagttcattgcagcactatgcacaatagtaaaaacatggaatcaatctaaatgcccatcaatggacagattggataaagaaatgtggtacatatacatcatggaatactgtgcagccataaaaatgaacaagatcaggtcttctgggaacatggatggagctgaaggccattatccttggcaaactaatgcaggaacggaaaaccaaataccccatgttctcactcataagtgggaggtaaatgatgagaactcacggacacaaagaggggaacaacagacactggggcctacgtaacgttggagggtaagaggagggagagaataaggaaaaataactatttggtactagggtggcaaaataatctgtatgacaaacccctgtgacacaagtttacctatataacaaacctgcacatatacccctgaacataaaatttaaaaaaattttaatgtggtacttatatgcaatggagcactattcagccataaaaaagaatgagatcctgttatttgcaaccacatggatggaaccgaaagtcattatggtaagtgaaataagccaaggacagaaatacaaacatcacacgttttcacttatttgtgggatccaaaactcaaaacaattgaactcatggacacagagagtagaaagatggttaccagaggctggaaaggatagtgggagggtggagacgcaggtaggtttatgtgtacaacaaaatagaaacgatgaataaaacctggtatttgctagcacaacagagtgactatagtcaataataacttaattgtaaattttaaaataactaagagtgcaattggattgcttgtaacacaaaggataaatgcttgaagagatagataccctattttccatgatgtgattatttcacattgcatgcatgcatcaaaacatttcatgtacccataaatatatacacttactatatacacagaaaaattaaaaattaaaaatatatatagatagccgtttgtcttatatttacattccttttaaaagtcttatatttctgtatatgaagaatacacaatacgacgtacaaaatttaaatgtgcaagagttaaattgttgaggacagaaatataatgaaaaatattgtcagattttctcacacatattatttaacttatcctactattaattactactaatggccactgtttagtcctagtgttttgtttaaatagcacttatgtaacagaaaataatacataaaaaacatataatttcaagtgaacacttattcttaagtaatgatacatatggacaattatttataatatgttatgggttttcttcatctagcacatctatgtcctgggttggctctctgaaggttggccaccctaagactatagtaccattctagtgggaggaaaaatatataaacaagatactatttgtaaattgcacagaatagaaactgataaacaatggtgccatctgtgaaagtgacatcagtggctggaacaggtgagagaggctttcttttactagggtattttaaagtagtcttaaatgttgtaccttgcaaatataccacgtatttttattttattttatttctttttctgagatggagtctcgctctgtcgcccaggctggagtgcagtggcgcagtctcgactcactgcaacgtccacctcctgggttccagcgattgtcctgcctcagcctcctgagtagctgggactataggcgtgccctgccatgcccggctacattttgtatttttagtagagacagggtttcaccacattggccaaactgatctcaaactcctgacgttaagtgatccgcccgcctcggctcccgaagtgctgggattacaggcgtgagccaccgtgcctggcccccacctatttttaaatgtaccttgcaaatattcaaaagcaagggactgttactagttttacacagaggttggccacagtaagagtggagaaaggcactagctcagcgtgggagcacgtgctctcactggaaacaatgtattgagaacacatggttcttggttggggggagttcctgcccaaacttcaagatggcggccaggtggactgctgattctgatgagtctgatgaggtgagctgcgccacaaaactgaaggacccgctaagcctgggaaattagtatgtatttgtgtaagtgtttgtgaggagagccactggagggttttaaggaaaataatgattggatttatgactgaaaggtccgtctagctgtgtaaggaatgtggggggacactatttggggagcatatttctgtaatcttggtaaggatgttggcttggactcgttagcatagtagcactggatggagatgtggagacatggatagaactttgggaggtcacccggacaagacttgttgctaggttgagtgtggattgtgagggaaagcgccaacatggctgcctgctccgtttctggcctgggtgagtcacggttcctgttcctgagggagaatcctagggcgttggtggatgtggagggtaagaatgagttatctgcgacattttaagccagagatagttaactgatgcacattttttgaaagtcactggggctggatggtaggttctcacgaaaagtcattcgggctgttctgtgggtgaggggctgggaagggtgtaactgggaggcaaggaagggtcctgtgttggcctcagcggggagacaggaagctgctccagggccaagagaggctagagggtctctaacgggccgagtgaaggctttagtttttcatcagtgtgaaatgggcagccacggtagggctttgagtgtgacaagggctgaccaaagtcttgctgtggggagagcaagctattgggtaggattgtcagatttagctaataaaaatccaggacacccggttaaatatgaatatcagaacaattatttcgtagcataagtatggcctgtgcaaatctgggatatacttatactaaaaatgtattccttgttgatgtgacattcaaacgtaacgggtccaactgtgttggaccaagcagccctaacaccgactgggtctggaattccgggaggccgaaaggggcaaaggtggtagccgtggaggtgtgaggagggacccccgcaaaggtgaggttggcccacttggtgccctttgccgggaaacaactctgggaagtcgagcttctcggcccctctacttctttcaggccccagcaggctccatggggaaggattacctgcctcttccaatactgaactcgggcaccccagcgcgtctcttcccctggccagcggcttgctgaaactcccgcccccggcggctggcacgtaaccccgccttccgtttccctcctcccgctccccgcaggggtggagcctgagcgaggagcccgcgagctctcctctctcctctgtctccgcggatgacgagtggctggataacatggagtcgggcaagatggcgcctcccaagaacgctccgagagatgccttggtaagtgcgaaggataagccgcggatcgcgaagccaggtgcagccagggacctgcgaggcggggccacgctgagggcctgagggtcggctcgcacgctcgtttcagtctagtcagggccgtcaggaggagagggtgatggggatgcgccctggcccccgggcccctatctcgccgcttgggccaagtcttgccagagggtcgcggtccagtggagcttgcggaacggctgcccagctttgtgtcctgggcttcgggcccctgcctccccctcgtctctagctatctgccagccctgactccgcgtccagggttctgatgctaccttaacccgccgccacagccaaaaatgacaaccagctggagctacttacctctgctggagaagccaaattctgtcttctctttgccccacaccccgcccccaaccccgccaaaaaataaaaataaaagttttctgcaaaagcgtactatgcgatttcgtgtgatcactgactcacttgggagggcaagggtgagtaggactttggagcccaaagaaggggaaccttgtatcataaatataaatactacccttcagtgcagccttgatttccagtaccaaattctgcatctggtgtttttatttgaatccacaggtgatggcacagatcctgaaggatatgggaatcacagagtatgaaccaagggttataaatcaaatgttggaatttgctttccgtaagttaatgaaacaccaaaaacttgcctaacttgtgaacttgaaaagatatttttattgtaagaacattttcttttattttcttttttgagacagggactcgctgttgcccaggctagaaggcagtggcgcgatcttggctcactgcggcctccgcctcctgggttcaagcgattcttgtgcctcagcctcccgagctgggactacaggcacttgccaccacgcccggctaagtgttgtattattagtagaaagggagtttcgccatattgcccaggmtggcctcgaactactgactcaagtgatccccccatctcggcctcccaaagtgttgggattacaggcgtgagccaccgcacccagccttgtaagaacattttcaaccaaattatgttaacagtatcatagaattcagcctaaagaacgaaaggagctcaagctaggggacagtagtattcacactgtgatatctgtttaaaactgatcatatagacaggacaattacttattaaaatcagcatttaggctgagcacagtagcttacacctgtaatctcagcacttcgggaggctgtcgcggggaggccaggagtttcctgggcaacatagcgagaccctgtctctacaaaaacccacaaaatttataaaccgtctacaaattagtggaaagttttattaagacaagtagccataaatattaagctgtcttcatatgtttaagaaaagattgttttgttcttataggttatgtgactacaattctggatgatgcaaaaatttattcgagccatgctaagaaacctaatgttgatgcagatgatgtgagactggcaatccagtgtcgtgctgaccaatcttttacctctcctcccccaagagatgtgagcaaactttgatttgaagttatttttacttacaatttttaaaactgtagttctaataaggattttttttttaagtttttactggatatcgcaaggcagaaaaatcaaacccctttgccactgattaagccatatgcaggacctagactgccacctgatagatactgcttaacagctccaaactataggctgaagtccttaattaaaaaggtaagaaattttagtcaacttttctttttttaaaaggtggaatatgataggggactttgtgaaaagcaaattcctgtagctagtatagtagattaaaggttaagataacttactagaatttttttaattttaaaaaattttcgagctagatggaactttastgttcatctaactcaacagtcatttttcacatcaggaagcagggcctgaactcatttatgaagttagtagcaaagctaggactgattccaagcctcataactcccagtctttccactatatcatagttttttagtgaggcctaataacagaggaaatgataccatcaggaattaggccagctttctaaaatatgacataaagctctcccaccactgaaaaagttctccccataataggctgccttttctgaagttccactataagagttttattcttttttgggttaagaaattgaccagttaagattaaaaatcacaaagtagttacagtcttatttgaatggggataaccgctatcttaaactttaatactgcataagattttatacgtattcatatctatttttatatagatagagatgtatatatgtttatacaaaccccagattaaatgttggatttagaacactgagagaacaaaaacaggactttcttgccatggattatccataatcatttacatcagcaatcctaatttcattcctggtaaatttaggtgtcacatcttaacattaatttgttttttaaatcccctagggacctaaccaagggagactagttccacgattaagtgttggtgctgttagtagcaaacctactactcctactataggtaagtgagaggagacaatggcatttctggctggtaaagcagtgcctcagcacttggttttgaactataatgcaagtcaaaaagtgaatcagaaattcttgtgtatgtgttactattaataattttactcatcctctagtaaagctataaacatacatgttactggatttcaaaatgagaaagccacaaggaacgtctgatctcaaatgaatataaaattggacattgcccccattgttgttggtataaactctgataccaaaaacaggagtttactcttagctgtgtactttacgccttctataaggtgccacacacacttatggcagtagactacttattagaaatttaaatttccaaatacattgatgagaatacagtagaaagaagattaaggtgtacaaaaatcttaaggatttcaaagaaaaaaattgtttttaatactaacctttttaaaacatagtactgattgttttagattggtcagtgggagccccttcaagctgtttcctgtgtccttttgacgtatctgcatcattctgtgatcatttcttgctttctgatgcaacaagatgttccaaactcatctttatatttttctgcctaggtcctagaatcatccacttgtccaaagagctctagttccttttagtggagaatggtatttagaaaccattatttgtttctttttaatattgttgtttagataataaggaaaacaaataatggacttagatttcctgttttttttttcctacattcctgctgggtttcttgcatagtctagtattcaaagtattttcagaaaagtcccttttcaccagtattaatttattggctcttattgcttataacttgagtcctatagctgtcatatagctcaggtataaacagcatttgatttttgaggtgtgtaaaccctctcttcatattctcaggatgtaaatttgcatttcagcattgtaaaaccagtttgggtatagtattagttgtacatgtctaattacctacctgtgacctttgtggacagaaatctgcattataatctttgtaaattttcatcatatactgtttgtctgtgggttcacattacttaaatgaataccagcttttttaaacccctaggctggtaatcagtttcgtgtgttaggcaggttaaccaattttagttatcagttgtgatttttattcctagctagacatttgttgtacatactgttcagagattgttaaaatctagagtcagggcactaccaaaaaacgcctgatagttttaaagatgcaagtttttttttgtttttattttttattttttgagacagactctcactctgttacccaggccaggctggagtgcaatggcacaatcttggctcactgcaacctctgcctcctgggttcaagcaattctcctgcctcagcctcccgagtagctgggattacaggtgtgcgtcaccacaccaggctaatttttgtttttttgtgttttttttttttttcagtaaagacgggatttcaccatgttggccaggctggtcttgaactcctgacctcaagtgatctgcctgcctcggcctcccaaagtgctaggattacaggtgtgagccaccacgccaggcataaagatgcaagttttaaaatttaaaaaaattaaaatgagttggccaggtgcggtggctcacacctgtaatcctagcactttgggaggccaaggtgggcctatcacttgaggtcaggagttcaagagcagcctggccaacatggtgaaaccccgtctctactaaaaatacaaaaattagccaggcatggtggcgggtgcctgtaatcccagctactcgggaggctgaggcacgagaattgcttgaacccaagaggcggaggtcacagtgagccaagatcatgccactgcattccagcttggacgacagagtaagactctgtctcaaaaaaaaaaaaaaattaaaatgatttatatagacttaagacctgagtatttactctgttcaattgggggaagctccatctacagtctaatgtgttcagttttaaagcctgaactccatacctactaaaatgtattaacaatccttaggccaagaaaacatccacctactgtgagttttcttttttctttataaaataaaatacttacattgcttcattacgcttcaccaaattctttgaactgatccttaacacatgggaaaacttacctagggatggagatattttagaggaaggtctcaccttctgtgtttgggagagaaagcagtaaaacccggatttctcrgtacctttgggctttattcccttagactttcttcacctttgtctctagaaatgatgataattgcagtgtcctcagcaactctatctctgggtagactgctggttccagggggaagggatgtattggaaagcctgcatccccaaatgaaaaattggaaatggatacatttccataaatgtattttttaagagagcaatgatgtcagtatatatattaagtcttcgagtcttacaaaatacatttattaagcaaacatttgttgagtacctattaggagcaaggtaaaagagccatgtgctcacaaggatgaaaaatgttagtcaaggcttgtaatctagtcaatgagataagataataatgactcctatgacgttaagggaacttcagaggcaggatataagacgtttaactgagaaaattaaggaaagttttataaaacggggtagtatttgagctgtaccttggaataatgggtagaatttagatgactgggggtttagactaggttatctccaagatatttttctgcttaaaaagtatctgaacacagaaagggaataaattttctgggcccacctggagacctcaaggggtgtatttgatctctgctttagtttcatgggcatagatgacatcttctgattctcagcaggtgaccaagattaaaagtgccaactaaggtaataaatagaaaacctgggtctttattctggtaggttaaactctcatctttatgtcttcatccagctatacctcagtgcttactgtgtactagaggctgtttgaagagttttacagggattatttttacttaattttcacaataattatatgaaatgggtgatatatcccccattttacagaggagaaaactgaggcacaaaaatttaaataaacttgcccaaggacactcagctagtaggtgagagcctgtattcaaactcaagcaggtaggctacagagcctacattctttaccactattctatactgaattttgtaacatctaaacaagcttgtaaatttttttaaggttgttttgctcttatttctaatgactttttcctcaccttttattagtttcctttgctttgaagatagtttgcggtaagctgagtgtagaatataaatctgtataagtcacctaacaaacatggtctgtttattgtaactacagcaaccccacaaacggtgtctgtcccaaataaagttgcaactccaatgtcagtgacaagccaaagatttacggtgcagattccaccttctcagtccacacctgtcaaaccaggtaatgtgattgggagtgggggacagaatttgtgaataatttgaaattgtaggaccgtttgtattcctatagcaagaggtaaattgttttaatacccaacaggaaggtggcagtaatgctgcaaatgagggttcttcagagggacctatgagccctctaaaattctgtgaaattttacataaagtagtctccccccttatccttgagggattgttccaagacccccagttaaatttacaacctttaaagttaaatttataaactttctaaattataaggtttaatttataaattaggcacggcaagaaattaacaataattaattaacaattacaacaacatactgtaataaaatatatgtgagtgtgatctctcaaagtatcttactgtactgtactcatctatttttggatcgcagttgaccacaagtagctgaaactgcagataaggggggactactatatatgtaacgttttggggaggagggaaagagtattcagtgtgttcatcagattttcaaagaacaccgtcagctaaacagttagggtccacaaatctaagtcgtcttcaaggaaaagcagttaaggtaaaagctcaagaaagcgacaaaacttagtgatgaatatgtgtatgcaatccagaacataaatgtaaattcaaatgaaattgtacctttacttcataggatacacacacacacacacacacacacacacacacagattggaataagaattctgtcatagcacagtttactaatgtgtatgtctagatttcatatcttctgaaacctaaccacacacaataagcaactaacgtaaaatactggcctattagggaagtgattcctgaccttgaacataggcctttgtttaatatgttgcatgatgaatccagtgcagtttcccatgactaaattgaaattctaggttgttaaaatacaacagaacttcttcaaccttgtactagatatgtttaatctttatctatacatagatcagaacatcacattatatcccgtacatatacacaattattggcagggtacaatggctcacacctgtaatcccagcactttgggagaccgaggcgggaggatcacttgaggccaggagttcgagaccagcctggccaacgtggtgaaaccccgtctctactgaaaatacaaaaattagccaggtttggtggtacacgcctataatcccggctacttgggaacctgaggcacgagaatcacttgaactcaggaggcggaggttgcagtgagccaagatcacgccagcttggacgacagagcgagacactgtctcaaaaaaatagtaatttaaaaataaatacacaattattatttgccaattaaaaataaagattttttaaaatttaattcaactcattgcagtataagtacctatgtttcttctatgatatagttgcacttcatgctattgaaattggtattagaattacattcagctttgttgtatactttttatcatatgtttcagattctgggtaattcatagcttggttttgggggggctttcttctctgtttacagttcctgcaacaactgcagttcaaaatgttctgattaatccttcaatgattgggcccaaaaatattcttattaccaccaacatggtttcgtcacagaacacagccaatgaagcaaacccactgaagagaaaacatgaagatgatgatgacaatgatattatgtaaggaatatagtctagtctagatgcatttcaaaaggaaagttggttttgagcccagtatactgaactagaatattctagatcttgttttaccttaaaagactgaaatgtagctgcagtatttttcgtcagttaaaactgttagatctctttagtaaacatacaaatgtgtttttcagtaggcttcaattacaaacagttaagtacttgtttcttaatagtttcattaatgttgagtcctaatatggcaattctgtttttgagacacttttctgccttctatcactgatagtagcatttaagtttcarattctacagcctagtcagcagatttatctttgacagcataatttctgatctacatttaaatactactttattttataaggtaatatagttacttactgtcactagctaatttttttttttttaccaaatctctcaatataggaaacattttttggaaaggatggatttagaggagagattctaaatccattttggatgtatttgtttctttgacttccttaacttccaaactcaactccctttctagatcccattcattttctgcacctcccccataggcttgtttctctccattgctattaaatgtagaaggccatacctggaattttaaaaatattattcctggtaatacagctcagtgtcattttcctatttttaaaacatgctctacatgcctaatgttttgtgattcactttaacctgatggtttgcatttgctgtttttcactcttatgtcagagcagttgggttttaccccttagtttttatgcctgttaagctttactgtgcttttgacaggtagttttgggtcagttatattcagttttagtattgtattccaagttgataactcttccatgtttcacatttctaaatttaacagagatgctgtagcttaaaacatgttttgataagtaattacactggacctaggcaaaaccactgaagaacaagtgttcctttttaccacatacatattatgttttgatcactgctgcttgagccccgctattggtataattcagatcattttagcttgttgctgaggatgtcacatataagacaggatcaaacctgaaagacactaatggttcatcctctataaggccaacaaagaaaacaaattaatgtgatgtaacttgcatttatgtgcactctgcataggtttcccaataatactgtaatgttgctgaacacctttccctgttttccatttatacacatattaaagtcatattgggaaagatggcaaagcttttgagaatataaacacacctgttttgtttttcttaagttcaacatacttttgtagaatttgtaaaataaatgttcrtatcataattgagaatttatagccaaggatcctcaaaacagaagtttcatcttaggatagtgtttgatatatctaagaaagtccagtaacagagaagaaatgtctcaaatgtctcgtatcagttttagtgtttttcagtattagggaaaggtaatataaaaacaggtaaaatgtataaaaatagacctgatcaacatcataggagataaatmttcattatatagcataggatattattacttgaatgttctcagggaggcagcaagtcagaaggcctaggttctagtcctagctccatcatttaccaactgtgtgaccttacttcacctcttagccttgttctcctcactagcagtaggaaagtaacacctaccctgcctacctcacagggctgttgtgagggttcaattggtatatgtgaaaattctttcagaattgtaaaatgctatatgactgtaaggaattattgcatttgttccaaggttaataaaaatttgagcttatcagtgttttcattttttaggattcaagggagatgaacaaagcccagtaattctgatggccaaagaccagtaagatttgtttaatggttatatatcagaaaatcacttgcttttatctggaatcagcatgtgacaccatcatagtgaagcaaattgaaaatgagtagaagaatatgggtttaaatctgttgtccttcagcttctaggtggaatttttaaaaaataatatgtgctgatggtaaatgggatgaggacactgttacctccagttcttccttttatgggtagcaaacaagtgtctatgatctgagtacgaatataggaatatagccagcatggggcggggtgagaatggaagatgtgatgcacactatgttctaagggatccaaggtgacagggaatattcaagaggcaggaaagaaaacactaatcaactacagaacagcaggtatgccaccatttacattttaatatatctatatacagatagatagatagatagatagatagatagatagatagataggtacacacatgggtatgctctttatgcagagtctcactgttgcccaggctggagtgcagtggcgtgatctcggctcactgcgagctccgcttcccaggttcacgccattctcctgcctcagcctcccgagtagctgggactacaggcgcccaccatcacgcccagctaattttttgtatttttagtagagacagggtttcaccgtgttagccaggatggtctcaatctcctgacctcatgacccgcctgcctgggcctcccaaagtgttgttgggattacaggcgtgagccactgcgcccggcctcttaatgtatattaaatagccttagattgaaagaaactggtcttccagaggttgcttctggggagggaaactggtaggtaggggactgaggaaggtgtcttcattgtatactcctttttgatcatgtgtaaacccctgtgctagagggaaattttggaaatgaagaaaacaggaaaacactgagctaaagaaccaaattgttcacttacgacatgggaattatttttttctgcatataaacacacatatatagtctagggttaaaggtgaatttacaacttaaagcatacacctttgcaatattttaccaataattcataattccaaattagaaagcacatccttatactgttttgtggggtttttgttttgaggcagagtctcactctgtcgcccaagcaggaatgcagtagcgtgatctcagctcactgcaacctccacctcccgggttcaagtgattctcctgcctcagccttctgaatagctgggactacagtggcacacgccaccacgcccggctaatttttgtatttttggtagaaacggggtttcaccatgttggccaggctggtcccaaactcctgacaggtgatctgcccgccttggcctcccaaagtcctgggattacaggcgtaagccaccatgcccggccccttatactgttctagcttatatgcacacaagttatctactatcttctttggttaggttaaaaattccttcagaacataaatgctcttatattccctctatcacgtctttaagcacatagaaggaactcaaatatttgcctaattgacaagttgtttatgactggagattcccccattcattctttaggttaacaacccaaataaatgaggggtgatcctggaaacagtccagtagaaagtacttaaaaggtacagtcagagattgttggatagataatgttggcaattgtagagtctaggtgctgggtttatgggagtttatgcttctttcagttccatttgaaataatttttaaaacgttggaggaaaggtaatcagtaggaaaaagtcacaaaaattggactagaattcctgagtacccatagaggtatgcagaaacatggtacaatttaaaattaactacaaatatgggtacagtattaactaaaatacaaatgaagaaaaaacttgagctttcaaatttctgttttgtttagagcaaccaccaaaattttcttttgctattctatccagggttaaacaaaatagtctagaagcatcatgtcagggatagagtctagaagcatctatagcctagaagcatcatgtcagggacggaggcacattggaaaagcatcagccactggaaccagacaaacctggacttgaatccctgctgttacttactagctctgtggtcctgtccaaaagtttatttctttgtccctaaaggtgaaatacatatcttgccagcacagaatttctggtcagacatggctttttcaaatcatgtttacctctgctctctcccaaaactccattaaaaggacaggaaagaaataggaaggtaaaattataaagatgatgaaagaatccgaatggccatttagattctcaatagtgacaatgaaacagtggcttcgagtctcaaaaagtgatactcaggctaaaattctatatatagccaaactaggaatcaagtataagggtcgaataaagacattttcagacttacaaagtcttagagattttgcctcccaggcaccctttctcaggaagctagtagagtcttgtgttctacaaaaagtagaccaagaaagagggaaaagggggaatccagaaaacaggagtctaacacaggaggtaaaagaaatccccaagaaggttataggaaataccagagcaacagctagctgtacaccctgcctagagggcatcaagtacaaattggataaaggagcactaaggactcctgcagggataactctaacaaggattattcaatatgttttaatatattgagacacttatgcttctagaagatttgggaatgaatcactgatgggtatacacagaaaattttttgaaacactgttaatgccaaagacaataaaagttacataagtaaatttaatcatagcatactacatagctcagctgtattagttatgtagacttttgatctaatctataattgtgacaaaactataccgagagaatgaagaagtggaaatatatgtggaacagagccttcctccatggtatgaaatagatttctttaaaaaataaaaaaaaaagaagtgaacaatataagcatattacttagaaacatggaggtatatacctgaaaaactcaagagttgaaagtggtcacctctggggagtgggaatcttgaatgggaggaatgggctggggcttttttgttataagccttgactttttaaattatgatcatgtgtaactgataaaaataaaagttagaataaaagcactagcacaatgtctgccataaagtaggcccttgataaagaatggacatttatctaattgtcccatctctccactgctgctgccccacttcttgcattcagcaatatagacatctgatccgttcctcaagattctattctcacccttcctaacaaagtatgacaggaaaaaaaaaaaaatcacggtttcaatggacacttttattgtttacttaatggatcatcaattttgtctcactacctacaaatggaatttcatcttgtttccatgctgagtagtgaaacagtgacaaagctaatcataataacctacatcaaaagagaactaagctaacactgctcactttctttttaacaggcaaaatataaatatatgcactctagaatgcacaatggtttagtcactaaaaaattcaaatgggatcttgaagaatgtatgcaaatccagggtgcagtgaagatgagctgagatgctgtgcaactgtttaagggttcctggcactgcatctcttggccactagctgaatcttgacatggaaggttttagctaatgccaagtggagatgcagaaaatgctaagttgacttaggggctgtgcacaggaactaaaaggcaggaaagtactaaatattgctgagagcatccaccccaggaaggactttacctgtttttgagagagcacacatacatagacagcattactatagggcccagtaagccagatttcccccactttatcttcccaataacatgccagctcttttttaggatatatggccaggagctggccaacttttacattgtggattccaggtctactagaccataactctcagaccaagtttctatctgtccctccccgcctcagtggatgccaggagctttatctgaagttcctctgtactgcccaggtagtaatgactgctaatgacaacactaccttctaactttctccactccattctacccacctctcactgcacagtccacccttatcccaaacaagccaaaaaacagaagaccctcaccttccaggagctccaaactggcaccacccccagtgctcacatggctgactttatcctccgtgttccatttggcacagcaagtggcagtgtctccaccacctgttgaatgaaagccaggtaaaaagggaaaagagagaaaagaaaaaaaagggattggcaccaaaactgtaaggcagtgtgctccccaacccaaaaggtagctgataaacccccaactctatcttaccaagaggctcctctgtaaattacctacctgtttacctcttaacatttacccagaataaagagacatagaagaagttctccattccaccttcctctgatcagaattctgccagcttatatgggtattagctttgtataggaccgcttacctatgatggtgatgcagcccctagaagtggctttcaccacctcatccatgagagctttggttccccgggcaaaagcttcccattcaaatacccccacaggaccattccacacaatctgcttagcccgagtgacagcctcagcatacttcttgctgctttcaggaccacagtccaagccctgaggggtagaggtgaaagagaagatgagctatcaagaaaagctacttaaacaccacctccaccaagaccagaactcagggctgcacaccaaagtttcttctagaaacaaatagtacccttcagtctttataaacctgttcatgccctttatactcaaaaattctactgtatggaagatcaagtctaacggaaaacctcaaaagttatttaataaagacattcttagccacactatttatgttagtgaaaactagatcaatggttctcaaccaggtcagttctgccccttcataatagataggcatgtggcaatgtctagaaatattgttgttgcaacttgggagggtgctactggcatctagtggccaaggatgctttaaacaaccttacaattcaacagtcccccacaaaacaacagatgtcaatagtgttgggaatgacagtaaactagatcagtagtactcaaactttgccatgcatgagaatcaccaggagggcttattcaaacagactgtttggccccaccctcagttcctgattcggtaggtctggggtgggacccaagaacttgcatttttaacaagttccaaaaatgatactgatactgctggtcttaggaacatactttgagaaacactgaactaaataatacgtgaatgcctgaaaagaaaaataagcaaactagcatgtaaaaacatgatacaattttatacagcaatcaaaatgatatttggagcaccctaaaatcaactatattagtctttaatatacacttacatttctccctgcttgtaatcagtatacttaattttttcatatgagaaagttttcttatatagctttctagatagcaacataatccaaaacaacccaaaccatgaaagtacatgacactatctccagtacgcagtaagtacttaatacacattaaacagatgaagaaaaaacagataaaactaaaaatgggccgggcacagtggctcacgcctgtaatcccagcactttgggaggccgcagcaggtggatcatgaggtcaagagattgagatcatcctgaccaacatggtgaaaccccgtctctatgaaaaatacaaaaattagctgggcatggtggtgcacacctgtagtcccagctactggggagggttaggcaggagaatcacttgaacctgggaggcagaggttgcagtgagccgagatcatgccactgcactccagcctggtgacacagcgagactctgtctcaaaaaaaaaaaaaaaaacaacaacaacaaagttttgcaacacattactgcattactgaaggccagtaatccaatagcactgcttttctcccatggattcttccatgagggactcactgcaacatgcagagccctctctgacagatctcctatagagattgttttaaaatgcttgttgattggctgaatcaatgaataaatgacaccacagagtttctgttcactcacactaccaacccactcaagtgactcaccatcc

SEQ ID NO: 97079 - DNA, 14244 bp, Homo sapiens
aagatgccacactgctggccttgaagatggaagaacggccatgaacttcttaacatcataaatgttcttttctttttacttctttctttattttgtctattgttatgatgagatccaagcattttctcccttgtatggatttttcataagctacgaactaagctacattttttagttactattttccccctaacttcttgaatttgaacatgatttcatttttagttagcctacagatggaagcacctggtttccacttttactggagccactttagtacaaaataatgtgctttttataaattttgtaataaaactttgctaggaagcttataaagactcaaattaaggcttacaaattaccttggtgattatagttacaggtcctgcagtctgacaatatcagtgtttaaggtagtttcagtaacaagggtaaaataggtaggtacccgggctatcacttgtatcaattgttattgtaattctgtactcccaggattacagcccatgttcattggtatcaaattgatcaagttggtatgttgatccataacttctttaaatgaaggtcccgagggttttttttaagagaggcatcttgaaagtgagaaattagttaatagtataaattttagattcagccaaaccaaggttcaaattctaggaatgacacttcttagctggcagctgtgagcaagtcacttaatttctctaaacttgagttactttatttttaaaatacagaaattttagttattttatttctaaaattgagatgatataaggttgtaaggattaaatgagagtatggaaataaaatgctatacatgtaataaatgttcagtaaatggcagctgttattaacaagaattttaattgcctagagtaacttattacagtgcaaatgaactctgatgataatctcaatagttaagcatttctctttttttgttttttgtgacggagtctttgtcacccaggctggagtgcagtggcgccacctcgggttgcttgcagattccactaggttcaagcaattctcctgcctcagcctcccgagtagctgggattacaggcacccaccaccatgcccagctaatttttgtattttagtagagaaggggtttcaccacgtcgaccaggttgggctctgactcctcaaatcaagtgttcctcctgcctccacctccacctcccaaagtgctgggattacaggcatgagccattgcacccggcccttaagcatcattttttactgatttctccgtcagtgggctgaagttattttccattctgtgcattctttgtttctttcaaggaattttaaagtacacatggggttaatcagattgtattttaattttacatatttatattacatttagtaaaatatccagcaaatagtgcatattaatgttgatactgaaatggtgtttttaaatgttccatgtcagtgttctttctgtattcaaaattatgtcaaagatgcagtgtttcttaaaacagtgatagggtttttgctgttagtaggcaatgtagtcaagccacaattagtttgacaccaaggtggttatcatatcattactttagattgtaatttaacttcagtgatgtagtaattacttctgccagttttagtagttgctattgtaataagagttttaaaaggagaaaagtatattcaaatgtatgcttttattattaaacatttatgtcaggtggatattctatagagatgtaatcttgactcagttgttagaaaacagataaaataggaaatataagatctctgtttcaataagactggccagattattattatttcaccataatggcaacatctgccagggaaattaaaacaaaatttcctccctaaggagattctgcctgctccagctaaagctgtgtatatacagggaatgccaggaaattctgacatattgttggagcaaacacttcaaaaatgtcttgtgttttttctgttttagcaacttcactgtgtggtggttggaagtgaaaatgccaaacgatattttgaagcagttcaaggatctaaagagcatcaaggagagctttttgggatccataacctcttcaaatttaggtcccaagggtcttgtcttacgaaggacatcctggaggtgtgaacttcttctctgaccttttcaataatattttaaatacagtttttcttcctcaggaaatctgaaatacaattgctgttgccttttcagagaaacttttggttttctttatcaaaaatgccttggaatttttacttttagagaataagaaatgaattattgtacctctaaactaagattttcccatggataattacaaataatgcacacacacaaatgtatatgctgggtagtatgaactccaaggcaattttaaataggcagagagaagtttatagttttgaaaacagctgctgaagtcaggaactaaaaaaagaggttttcctaaataaacaaaaatataaaatgtgttttaattaaaagttaccaaatactccctgagctgtactctcatgtctcatggagatttttgttttctgttcccaataaaaattccacaccagtattttaaactctccctgttgtgttcatcctcagcatacagatgtttcttattcctcaaacaaaatattttatatccttttttaaaaaaatctttaagttcttttatataccggaatactaaggatattaacctattttctaattgatattcatataggtatcataaaatcctggagtatcatctttttcaacctcctcatggtatagatgaggaaactgagtcttagagaacttcaggatatttctcttgacttccaggactttgtagtaaaatcttaatgtacttcatttattcagtaagtaccataaaggcagttcaaggagcaattggttcctgtccttgaggaacttaaaccatcttgaccggaggtggaagagaacgtttacataataaccatgcaatgtcaggaatcgtatgctgaacaagttaaacagtagaccatggatggctgggggagaggaaggtatatattatttgaatcctataaatgttgttactattatacagtttctgatatatactgctgagtttctattttatagtaactatatttgattctgaattcagtggcccatttggagtcctactttttggggttttttccccttgctttttaaatacgctgtttctttcatgaatttgttctttccagtttcccttttcatatcaataactttgtttgccctccagctcccaaacccagctgctacctccatctcagagtactacttgacatgcctatattgatgttaaagtcaattgtctataaaaatattagcattttattatttatcctgttttctgtcatatatgacatagttacctgtttttatcagaataaccacctatttctttgttaaacaagtgttatataagacatatcaggatgacaggttattaagtagaaaaagttcccttgtttatcgtgccactgcactccagcctggggaacaaagcaagagacttgtctcaaaaacaaaaaacaaaaacaaaaaaaagttctcttgttcactggttattctaagaatatcttgtttcaccttcagaagtgtttattaatgacaggaccatccatgtcttacattttcttttttaaaaatatcttttaagttctttaatataccagaacactaagaatattaacctattttctaattgatattaataaggggtgacaaggccatccatgccctacatttgtcttgctaggcatatcattggcacttgattattaagttaaattttgaattaaaattactcatttgtcatcaatcagaatgtaaatttattcaggattggttagattcatgctgctttgggccaaaaggtgcttctaaatattattattagccccatataatgggagtacctatcataaagtaaaaggagtatttcacttcatgtgagacatttttaatttttaaaggttgtataaaatctcttttaaaatgttttaagatgtaaaaatttgaatatttacacttataatcttatgatttctgggcaatttcattctgttttgcattgactttccattatctatattatggtttctcttcaaagatagatattgagagttcattttacaagtatttgttgagcatctgctaaatgtcaggtactgttcatagagctttgcatacataaaagaacaaaataaacaaaacgatcctgtctaccagaagtctgcattctatatggggagacaaatgataaacaataaataagtgaaatatggaatgtattatgataggttctaaggataaaaaatagaacagggaagggaaatagaaactgttaaggaaggggcattgcagttttagatggggtagtcaaggaagccctcactctgaaggctgcatttgagtattcaaagaggtgagggaggaaggtgtgttttagataggggaaacaaatgcagaggtcctgagggaggaacatgccccgtgtgatctccaatgtcagggaggccagagtggttagagtggggtcagcaagagagcaagagatggagccggagagatgacagagagccagaccatgcaggaactttgacttttacttgaatgagacaaaaagcaattagagggttctgaacagaaagatgacatagtctgatttatattagcttgacttactattgaaaactagactatagaaatacaaggacagaagcaagaagccagttaggaggatactgcagtaatccagctgagagatgatgtcggcttgagccagggtgattgtggtgggtggcatgagaagtggctggatgctgtatatattatccaggtggcactgacaggatttgctgacgggtcagatacagggtatgagtaaaagagaagagttaaggatggctccaaggtgtttggcctgaacaacttaagactggagtggccatttatctataataacggagtttcaacagctttaagatttctagtactgccactttcacctgttgtagtcatttagcttctgttacagagataaatggtagcctgggaatgaggcttcccatcccattgctgtaatagcttccaggcatggagaataaaggacttgcagcagttcagaaactatcattccctagagttccataggggagattctcactcattgccctggataccaggtggctggaaccacgccattagtgtgtctgtattcttaagttgggcatttgtaactctagtgatggtagtattatttctccttgctctgtcaacaaatatagccttaaaaagagaattgatttccttttgaggagaatttaatattctagaatctaggccattagaacttctgctaaatgatacaccagaagctttaaagtccaaatactttcccaaaagatagcaagcctgttatataactagaatattgtttttagtttcatattagggtggaccttttcattttgatgtctcctacacctaaggggtatttttaaatgaatatgaacaataaatatagtaacaatataggctagaatatcaagttcccaatattcaacattgtggtgtttgaaatgttaatatgtccttaccataattattgtatgggaatggttgttatggatatcatactgggtaaatatttcacatttcttcactctccctcttcccactagtacttttaatgaagttggctggaaagtattagttttctgtgtatgtaaaagtaaactttaacacaagaattaagagtatttttagaatgttatataaatgtttatatatgagtttcttaattagcaagttgaaaaataacattaagaatgctaaagcaagctgcatgcaatttttctttcttagctccaagaatagcatgcattgctgttgtttatctggttgttgctaccccctgtgttgcatagctatttgcattctttcttactgacattatagagagaaggccaagtagaagcagggatcatgacagccacaacatggttgaaagagggacctccagcacacaaactggaaatggtatgtaatatttgaacctgtagactacaacacctagaaaacatgtactgtgacaattttgtttcttttcctttttccttaattttataacctgtaaaaaaaaaaattaagagtcaaggacacaaagtcagaggactatggataaaattaataattaaggctgatttaacattcatattataagaacaaattcaggagcagttcaggcatttacagctaaactgaattttaactacaccaaactgwaaatccagtaccacctagataactaacccatcccaaataaataatttttgactaaatggtaagttaaatggaaaaatcaccatcaatgtgtatttaaaattattgaacccaaatatcaaaattattctctaacctgaaagtagatatttgattccttaattttgtgatctttttagtagcttgtcatctcatgtaccaccaaatctttatttcatcataaggccatcttaaaggtaaaaaacatgtgtggaaggtttttttgttattgttgctggttttttcttgtttgtttttagagtcttaactatcaatttataccagtccaatgagtttaaattggggatgaaatttctataaatttagagaaatatatgaatctcaaatattggcaaaagtattatcagataatactttccgcaatattttactagtagagcctcagttttagaaaactaggttatatttaactctgattaatgtgcaaaggttacatattgaatttaaatttgtagcaaattttacttcaaaattctttatttctggtgatcaagatcctatcggcctttttaatcaattagaacaattttccagtcttgaattctttaccttgttaactcctgtaatctgtcttattcttaaagcgtgattggaagcatctgctagatgacagtaaactccagtaattcttaagcagtaagttgtatgcttttcactttcgaggccagaattatgtgtccttgcatcttagaagccaaacactccactttgtgtttttcttcaaaatactttgattatatggtactctagtttaaatttttttattttgcaacaatattcaacatggaaagagaaaagactaccagactatgatattaaatccttaacatttgtttattaaatgttgtacttttagaaaatattaagtgatatacttgtacctaaattacctgcccaaagttgagtacttttcagttgattccacattatrtcttgaggttttctgatgtttttgtcattgtttctcctatagcctagacagcctgactgtcaggaatgcagaggtacagaacaagctgcagagccastggcaaaggaagcatgtgatctctgcagtgacttcagtgatgaagagccagtgggagccacaggaataaagactgccaaaaacaaagcacccgattcaagtaaagcttccagctctccaggacagcttaccttactccagtgtggtttctcgaaattgcttgaaacaaaatgtaaagcagttgaggatagtgatggaaatactgcctctgatgatgaaagttctgatgagcagcccacatgcctttcaacagaagccaaagatgctggttgtgagaaaaatcaggactctcttggtacttcaaaacatcagaaattagataacatcctaaatccaaaagaaaagcatattttttataaaagtgagaagattttagaacagaatatttcttccaagtctgaygagaaaaaaattaaaaatacagataaacattgcattttacagaatgtcacagaatcagaagatagtgatgtcatctgtcctacacaatacacaactgagagattccccgacaatagtataaggtttaagccacccttggaaggatctgaggattctgaaacagaacacactgtaaaaacaagaaataatgataatagtcgaaacactgatgacaaaagaawtggaataatttcaaaaaagttaagtcctgagaacacaaccctgaaatctattttgaaaagaaaaggcaccagtgatatcagtgatgaatctgatgacattgaaatttcttccaagtcaagagtaagaaagagagctagttcattgaggtttaagagaataaaagaaaccaaaaaagaacttcacaattctcccaaaacaatgaacaaaacaaaccaagtgtatgcagcaaatgaggatcataactctcagtttattgatgattattcatcctcagatgagagtttatccgtcagccacttcagtttctctaaacagagccacagaccaagaactataagagacagaactagtttttcttcaaaattgcctagccataataagaaaaatagcacttttattccaagaaaaccaatgaaatgttcaaatgagaaagttgttaatcaagagcagtcgtatgaatcaatggataaatttttaggtaactaaagacacattctcaaaactttaaaaagtatatttgttttatcaaatagttctgtgagacgctttgaattaacttgtaaaacagccctaaaatcaagatgctgcattgaggcacaaataaggaacggttgggtagcaggataaatgggagaccacatataggtcaagatagagaatgttgccatctaccccaggaccccctccatgtgcccatctaaatcacagttcctctgcccccataaataccaattattctagcctctatagtaattacttatttacatttatatggttttatcaccaaatgtgcatccccaggtgaattaatctgttttcatgctgctgataaagacatacttgagactgaagaaaaaggggtttaatggattcacagttccacatggctagggaggcctcacaatcatggcggaaggcagtgaggagcaagtcatgtcttacatggatggtggcaggaaaagagagagagcttgcagaggggaactcctctttgtaacaccatcagatctcatgagacttattcgctatcatgagaacagcatgggaaagacctgcccccatcattcagttacctcccaccaggtccctcccatgacacatggggattgtgggagctacaattcaggatgagatttgagtggggacacagccaaaccatatcactaggtattatggttcagtctcatccattttgtaaaaatattatatagtcttttttaatctacaggaatcctcatccctttcattgccttacaatgtaactatggaagtacctggaccatctcttacagagtttccctcagtttgcattttgctaattgtaccctctccatgcagttaaacatgttcttctgtcttctatattacctgcaaaagagcagttggttcctgagactggatcagactcaggttcagttcctttggcaagatataagttagtgtttaacaagactatagtaggcacaaaatgtttattctctctctttatgatcctagcagccattgatacttaatacctatacttatttattcattcagagtagcaaaatattttctctttctttcgatttcattttcatttatttagaatgcttttgtaaagaggtacttcactacttcccttcattattgcttacccagtggcgcagttcatatgggagagacaggaaaaatgctaattgctttctttatttaccagtttttagtattaaactaaatatgtctatatgccataaggatgacccattcttttcttagtaattgattcaaacacatttagtgggtctcaattcattgcaattaataatattattaaggctccattgtcctatctgtggatagaggggaatctctgacatgaatattttggttcctgaagcattttggcatgctgctagtcattttggaagcttccttgtagtctagtcttacaagaggttccaggaacacctcatacattttctgtcccagacctacaatcagtcattattccaagaagtcttggtttcttttagagagaaagtgtgtttcaagaccacagtctggtgctagtaatgaacattgctactgttgacttggttattatttttgggccttttcagtggccagatttgtgtgtgtgtgtgtgtgtgtgtgtgtattttatatttatacacatatatgtgtatgtatacgtatatttgtgatatatattttatatatgtatgtacacatatgtgatgataaaatacctcgaggttatacgtccatatttgtattgatacttaatttgagagtatagagctcttatttagcctctttattatatgtgaataccatttctacaatattgataattctggttctcaagcatatagggaatgatttacttttaatgccccatgtttgctcatttgctttatcccatattacacaaagaataaaataacagtactaccaccatttgattgctggtaacatttagggtttatctgtttttgcctctactctcccttttcttccattttaaaaatggatatactatgtcttcattgtcaaagatacattgcattgtatactactcccctcttagacttcacttaactgttggtccacaggtaactacacatttcatgctccccatcagtccttaatgtcagtcttcctcgcatcgttctggttgtctgaatcttactgtctagtagattgctcaagaagtgttcatgagaataatattccctgagattcttgcagtaacagttttgtgcccttatacctaaaagtcagttttgctggatgtaaaatacttggctcacattgtcttttcttgagcatcttaaatatgtagctttgttttcttctggcataaagtgtggtattatatgttctttttttttttttttttgcctctccctggatgcccagggggtttttttcttttcattgttgtccaataattttactagcttgtgtcttcatgttggttatcctgggtccatattctgatatacacagtgttgttttcactcaaattttattttgggaaagatttgcttgtaccagtgtttttagttacttgttctattcctttggtttggctttcttcttcagggacttcttttcagatgttcagtcttctttgcctatcttcagtttttgtcacattctctcaaatctttatctgttcattttgttttgcttttttaaaatgttgttttgtttctcttaaggcttatctgttgtgtttattcccacttatgttccttctagtttagtcttcatttttgaaatttaaaaaaaaatttctaagtctttcctaagttcttatcactcatttgagttgctctaattctgatttacgttgattcatgtctttttctgttttgtgagcacatctttctagcacattttcattgaagggatattactctgcttgttctcttttttctcacaataatttttttgagatttgaccctgctgcttttcccttggtcatttttatatgaaattatttcccctgaattttacaaatgaagcagagcttaggaaatcttttctcacctcacagagatccgtatgttatttccatgtagagtgctgcactgtggtgggctttcctctcgctctctctcccttgctttgctctaggtcttttcttgccctcatccttgttcttcctatcctacttattttgattctctcccagcagtttttcctctttattgggccctgacctgggtgggagccctggtgggtcagtttggggagttctagtggttggcctgctccagcccctccaggccttcttactgtgtcccctctgcaccctctcagcattgaagagcaacaaaccttcccagattcagctgctgttctccagctggccccttgtgctttccggtgaatacctgttggcagttctggggtctcctgttcttaggtctgtcaggtaccctgttgcttcctactttcacacagatactgaaaccatgcagagttcatagctagtggagattttccccacctgcttgtactttaggtgtcatgagggtatcttgttatctaattttgttgtaaatgtccatgggcttttggttttgctgtctagttgctgtctgcttttgtgtacagattcagagattctcctgcttcttctgctgttaccaccctctgcccagaatctgtatggtgattttaagagttagcattgccttcacaagtgtctgacttattccccaaaaactatatgaaagaagctgagatataagcaaggacattttgctatagaaatcttaatttttgtgtttgattatatacaaatgaggctttctttgtggctattagcattctcgtttaagagttaattatgatttatatcttggtgtcattataaataagtactgaattaccctttggttggtgtgctacagttagattttaggtttgaggaattattgcataaacttttttaaataatcaactcagttttttgtttgtttgtttttactgtgtaaaaggtgtcagtagttaatttggaactaatgctattttgaataatggtaacgtgtcatcaaaattaagaaacatctgagtaaattttctgccatgaaggttttgaaactgtgtgccatatatagtacctggtattctgaaatgaaggagaatgttatgctagttactgtctcatcatattatttaacaatgtcttgtgtttgcatgattggcaatttctgattgaagaggttcaggactaaaacagcacaattgttgaaggtcatacctgaggttcattgccagagctgttgcagggagcttttacaggccttggttctagctttctcttttatgatcacaattcaaaaatgaattataggtgcctagaagcaaagcaataaaaattgtagccattttttaaacctctttcagataaaagccatgagttaatttttttcatttcctaaaaagctctcatcttgacattctctgggcatatgtacaaaaaagacaaaatacaaacagtaaaactgagcaaagccaatcaaacgaaactccctggtcataaaccccatgctctcattccatcactgtaatcaagtacatgtttaaaggaacagataaggttagtttcattctttaaattagtgaacatctttttttttttttaattaacaatgaaaacaaattcatagagaggaccctactcaaccctgacttttcttttggccaaaacctccatttcaggtttaaagattgttacctatcagtagttctcatctcacattgatgagaaggaaaagtcatttccaaggtaacccagactaacatatttgaactctttctcttttcaatatttttcctaaagaatattgtgatgttgatgtttctcttgagtattaaaaataagaataatgtgtttttatggaaccatattgctttatactgatacatcacttaataaacataaattacctcctagatggcgttcaggaagtggcttatattcactcaaaccagaatgtaattggatcgagcaaagctgaaaatcacatgagccgatgggcagcacatgacgtatttgagttgaagcagttttctcagctgcctgctaacatagctgtttgcagttctaaggtaagaaaaatatagggtagtatcatctttagttacctcatttttcacagaagttactcaataggatcttctctaagtactccctcaaaagtagcaacaaaaactgtaagtgacatacaaataagtgtaaaaatcaaaacaccatttgggaactgtagtcattgaagacgttttagattaaacaacaaatttatacccaaatacctaatcatgttgagttgcttaatagtttctctcaataaaaattggccagtactcccaaaatgaaaaggaatctgagggaatcatgtagttcaatcagaaccaaaaccatttctgcttatatggaaaaaggaaagtgtgtgattaggttgctccacaatttttcacctaaaatgaagaccaacatagaaaactcatttcatatagaatttatatttttagcaaaagggtttttatactgttaaaagtcataaatacttcctatgggctcttcccacttaaaattgctgttgtgatatttttgtttatacatagtcactttcatcaaaggtttttaaaaaatattttcttgtgtttggcttattattctttattattttctaagagctaagtgcc

SEQ ID NO: 97080 - DNA, 69143 bp, Homo sapiens
tttaatgcttaagtgcttctcccaggccttagaatagcacaggatacccagcagactcttggcaaatactcatcaaatgaataaaattaacagagcttgctgttcaacacgttacatttcaggtgttcctggggctaccaagaggagagatgaaatcaaagtgagagtgacgcacaggataatcagcatataattaatcacagcagctggtgagcactgtgaggccaagtgcagagcaggaagagctaaaggaagaacttgacaggatgttatgtcttacagagaggacagaaaggttagtagaaacaaataaaagacactcagagggctaaggaaagagcctctatagttattataatatgggaaagttgaaggtagaaaaatggtttaaaatgaaatgaagcaggaagtcaaagggtatttgaattgacaaggcatctggcaaagatgtattacaagaaagcatgtggaaagaatggttccacagtagtcagactgagggacagctgggaatggaagtggtacatcaacttgctgaagagcccaggatgtcatttgctgcccatctgagatgtttaacaaaaaacgtgtcacctaatcagctagaaaatatgaactagtgacccaggagagcctaactcctgcttgccttccaccatagacctgccagtgggctgctcagtcattcattatacttgaggctgggtgcagttatttgaagatcttttgagtgattcaatttcattaaaattacaccatggaaatgtgacattatgaaggatcatgaaccaactacagaaatacagaaaagctgtggcatgagcaactcacacctgagtcacttccaatacttgtaccctaatcatggactctcagttcactggtattaagaattaaaatttatttcataacaacatgagggggagagaggaagaagacaggaaagaagtacatcgaagtaccgacggaaccctttcagacaaagaaagtagaatgaagcaggactagactctgcctccctgttgtgccgaacctctattgactccaatggggatggcatcaggttcaatagaccgaagagacctaatgccagcaaatgagacatggggttttattggggacttacatacagggcagagagtccaatggtggcggagaaccacaatggcttgcaaaaagcatgcagtttatatagcatttccacttagcaccttctccctaacaatctccacctggcaatcttcattcaactcaaaactcggggcctcaacccgtgtgcggcccatgtttcacaggacgagccaggggctcagatgtccctttatagacaaggaaggaacctccaggttggctactcctggattccctagctcagaacacacattcagatgcgtctgccatacagggtcattctaagggtatgtttcagttattgctatcaggcacgtttaccacatgctcccaacacccaataaagtgaacatacaaaaattaaaaattaaaaagtcaaaagttcaccagcatcaaccaaataagaaaagggaaccaaacatgctaaaattgtaaaaagagtcagccaagaggaaaaaatagaaaattcttccatctgtattccctgaaaccagtaaccaggaaagaaatgtcatgctgagattctcacaaataccctccgattctgaacagccaacaggggagtgggtgagcagctctgaaaacaaagcccttgagggcagaagcccacacatatcacaggggctcgggagtggcagggcaggcacgcagggctggccaccttccagggtgctgggccatacttggggactacccagagcctggagtggtgacagagggacaccactggctggtggagggggctctgggacaagactttaagggagtctgggaagatagaacagaggctagccctcccacaaggggctcgctcagcatgagctgagctccagttctctcccacacctcttcaggctagaatagaatagagagaaagcaacctaacatttgaagtggggaagacaaccagttccacataagtggggagaatgacaaggagactccacttacactgtatctgagcaagtaaaaggtggggataatgtaggtgttgacatcaagcatggataagatgaaaacaaatggcatggaaactaggcaaacataccacaaccaacagaaggacagaaaggaggaggggagaaaggaaaagaaaacccaggaactcagcctgggagaaagtggcttctccatggctatctcaagctatggatgattcaagagaagtaaaaatataatataacaaaagctcaaagacaagataatacaccacagaataagatgaaaagattgcagagtgaaggaaacaaatttagattcaaatggcatcagtaatgagctagtagataaattagagcagtaaagaacagaataaaaatgactgaaaattgagtaaggcacagagtaaaggtctgagattattttagtgaatgcagggaaaaaagaaaaaaaaatcctatcacacaatcaaaagaaatatgatagatatggaaggcaaaggtgatgaaacaaataactatatttcctgaaatagaaaatccagtaagtataacagagaaaatattcagaaatagaaatcaaaaaattaaccctgatgtaaaggaaggagtaaatctggcctcagtattctccaaaaccatattcaaaaatgagaaggcagccaggcatgatggctcatgcctgtaatcccaacattttggaaggccgaggcaggaggatcacttaggcccaggagtttgagaccggcctcagcaacagtgagacctcaactctataaaaaatttaaaaattagtgaggcatgctggtgaatgcctgtagtctcagctactcgggaggctgaggtaggagaaatgcttgagcccaggggatggagattgcagtgagccatgattgtatcactgtactcgagcctgggcctaggtgacagagcaagatcctgtctccaaaaacaacaacaacaacaacaaaaacaaacaacaacaaaaaaccaaaccagaaggcaattgatcagaaatgtctaaaaagatctcagaatgctatacccagttatggtctttttttcttccttttaaatatttttattttattttaatttatttatttagagatagtgtctcactgtgtcgctcaggctggagtgcagtgggcacaatcatggctcactgcagtctcaacctcccaggttcaagtgatcctcctacctcagcctcccagtagctgggattacaggcatatgcgaccatgcccagctaattttttattttttgtagagacggggtctcactatgtcgcccaggctggtcttgaactcctgaactcaagtgaccctcccgcctcagcctccaaagtgctaggcttacaggtgtgagccaccatgcctggcctaaaaaatttattttaaaaaagtaatttatctcttacagttgtggaggctgagaagtccaaggtcaagtggccacatttggtgagagccttcttgctggtggggactctgtgaagtcccaaagtggcacagtgcatcacacagtgagggggctgagcatgccaacatgctatctcttttcaagtataaaagtaacaggcagaaattctgaaacatgaatgaacttaaaaatacaacacattccagctcttgtaacaaaaaaccactggacaattgtgattcttgagcattctgaaaaaaaaacactaaaaaaccactagacaagaaatcctgccctccagcacttgcgaaggtaaaagcgaagcaagttgtgaacactaaatacactgaaacgtaggacccacactgtagctgaaggaatgatgagtgcagaacagataataataaaactaacaacaaaaattaaggtcggggaaaaataagaatgggtagaaatttaagtactaattgcctcatctttcactgtaggaagtcaaatattctgttctatatatatgaaattaaatgtaatatgttctgttttaaaaacaatagcttatatatcctatttttttgaaactacttccatttatcctgtcatcccttaaaccagacatgatgggcaccaaaagttaacactgttcctttctgaaagatgggatatttagggattagttaatgatggttagaaatctttaggagctatgcttatgaatgatttttccccttttctctgctttcttatatattctgtattttgaaatgcatccatatacattaaaaaaaaaaaaacccaaaaacctgaatgcttctgaccatagatgataaatcatgagacgattaagaatgacaaaaaagaacaagactgagaaaagactctgctatagagaaaaccaaacttgtttaaaggcaaacgagcagaaattagcagagaagaagcagactgagaagcaagggcccttgaaatgagtaagggttccaccagttcactaataaaccccatctaaatgccagtaactcccaaattaatacctccataccaggtctttccctgaaccccatattcctatccaactacttactcatgagcatagtcggccctccctacatgtgggttctacattcatgggttcaactaaccgcgactgaaaacatcttggggggaagcatctgtactgaacatgtatagaactatttttcttgtcattactccccaaacaatacagtacaacaactatttacatagtgtttacatcttgcccctacatctattctctaaacagcagctagagtgatccttttatttatttatttatttgagagggagtctcaatctgttacccaggctggactgcagtggtgcgatcttggctcactgcaacctccatctcctgggttcaagcaattcttctgcctcagcctcccgactaagaacctgagattacaggtgcccaccaacccgcccggctaatttttgtattttagtagacagagcgtttcaccatgttggtcaggctggtcttgaactcctgacctcaaatgatccaactgcctcgggctcccaaagtgctgggattacaggcgtgagccaccgtgcccagcctagagtgatccttttaaagcatagatcagatcatgtctttcctttgctcaaaactctccaatgactcacatcacatcttactcagaataaaacccagtctctaccatgccctataaggtatcatatcttatgatttccagcacaggttcctgcctcagggcctctgtgtttgctcttccctccatccaaaatgttctccccacagttgcaaggttcactttcttacttcattcagatctcttctccaataatgtcagagaggagttccctgacttttctactaaaattccatccccacacccttttcctgctttattgagagcaataattctgtctctttgtttataggtatctccctagagcttaaaaaagtatctgacacaaaacaggtactcagtatttgttaaatgaatgaatcgataaaagaacccaggattttattattctcaaaatattataaagtctttccttcttattgatcagactacttgcatcactataattcagacaaatattatttgttcttagtgagcagtacatgtaagttatgaaaaactctaccaagcctaggagtaaaggttggtttctggtcaattccacacatgtgtgtttgaggaaggcaggcgttgtcaccagaatcaaccaacacagaccttagtaagtggaaaagagagctctggctgccttatcacctatttacgacagagacttcagaaactaatgctggctttagaaaaaaagacgaaaaggagaaaaaaaaaagaaaacataaactaatgttggcttaactgtacctgtccctgttgggtcacctccttggatcatgaagtctttgataattctgtggaattttgtgccattgtagtaacctcgacgagccaactcagcaaagttcttacaggtctttggagcatgcttccagtacagctccagcacaatgattcccatgctgcagagggagaggacaacagctccagtaaacaaaaaggtcagggcagacaggagtattatggaactgctccaggactcttgattttcaagcttgtaagtcatgaaattgtgataaccactggatttcatgctcagcaaaggaaaacaccacaatgcaagtaacataaacacccattatcttttttgagtaaaacacgcaggtgttctgggtacttcttttcagcaaaataacaagcatggagaactcaaaattctaatactatacatatatacatatgtatatatatatagctatatctgattatctgaaaccaatataaccaacccctaaattaggaaaaaaattcttacacttaatttttaattttttaaaaaaagagacattaaaatatcaggagttcatatttatttagaagtttctgggtgggggtagggactgggtagatggaaaataggaagatgtttaatgaataccttttaaaaacttttgtatttttgatccatgtaaatacattacctattcaaaaaatttcaataaaaggtacagtttgtgtttgtttgggagggagtataacaaaggcaaaacctggtaactttgaatctttgcacctacccaataggatgagtgctttttcctcaccagtactactaaaagataaggaagaggcaagagaaaggacgagtgccttcccctctactccagcacatacctagactttaagctccaaggatgtgacaatttttttttttttgagaaagggtctcctctgtcacccaggttacagtgcagtggcacaatctcagcttatcgcaacctccacctcccgggctcaagtgatcctctcacctcagcctcctgagtagctgggactacaggcatgcatcaccaagctcagctaatttgttgtatttttttgtagagatggggtttcaccatgttgcccgggcttgtcttgaactcctgggctcaagcaatctacctgccttggcctcccaaagtgctggattacagatgtgagctatggcacctggccagatgtgagaattgagtcaactctgtatagtctggatacccagtgccttgcacagtgtaaacactctataagtatatgaggartgtgctagaaaatagctaacagcctttctrcctgaaattcatccaattcatctttcacactgctcccattcaacacagattgacagttactctgtgtgtggtactctttccctcatgaagcttacattctggaggatattttcaaaatacagaaagtagccttttggaaagacaatcaggaagtacgtatacaattctgaaatgtgcatacctcagtaatttcaacttccaagtatcctctaggaaaatatacaaaagtgcctaaggatacaatatgtgcaaggatgttcatctcagtatttgtcatagccaaaaaaaaaggaagcaacttaaatgtccttgaaataggaaatgcctaaaatatcaactatccatactatgggcagctacctgaattactgagtgaaagaaaaccaagttacagaaaaaacatacatacagtatgatcatatgatcccatttttttgttaaaaaaacatgagagaggtttatatgtacatagaaaaaagtctggacaatcatccaacaaactgttgatggtgttttcaggaaggaggtgactttcacttcttactctgtatgtctacattgcttggatttaacaatttattttgtaactttaaaaaataccaacaggagaattcagaaattacaggttggagcctgaagatgtagaattttgccatataaggtggggaagatggccagggagcatgaaatgaacagcatgagcaaatagagagaggactgacagaactctgctttagctgaaagcagcaatgggcaagaacagaaaggcagaggaccttggctggtccctggctgttgaggggagaatggcaggtagacaagggccagatgaaaaaaatcaccttgaatgtcaggattaatacgtttttactttatactgttatagcagcawgacgttattaaaggttttttgagcaggatcccttccttgtcctactttgtaaagatcactttgagckttttccaaagaggcaatggaatgaatagagctaaaggatctagcaaggtgagacgagcacaccaggctccaaamgaggttcttccagttactagctgtgtggctttggtcaaggctttaagctgtaaattccggcgtttcctcctgctaatattgaaagggagaaagttaaataataccttcatgatttgagttgctaagattaaactaaatgagatgacatacagcggggcatggcgccagcaggttggttaccacatcactctttgatagtggggaaaatgtgcttcttcctgtattttactggaatttgtttctacaactgtattacttatcacgtaatgtttacatgtctgtctctttcattataccgtaagctcctaaaggcagggctgtctgtgttttatctacctctgtatcctcagaaytcatattccatatgcctggcttgcggactcattacacgtttgttgaatgaatgaatgaatgaatgagcggactgggggaaggaggacaatcaggcagctattgctgagacctcagcacaagaccccgcggagcttggacgcgggcgatggcggtcccctctcaaccctctgggggccgtctcggccgctgctccacgcccctccacgtggaggccggcctcccggaggaacgcgccaggaacgsagacccgtggtgaggcccgggctccgcgtctcctctgccagccccagacgcccgaaccccctcacctggtctccaagtaaacgttgggtggctgccaggaatctgggggaattgccgccatagcgaagccggcggcggaatgcttgtctagtaattgctacttccggcgtcgattagctggggacccgtcgctgctgcacacttccggtccgttcaaccctttcgataccaggatttgggtggccaagacaaggaagaggacggtcccttcttccaatgccgggaagctggggtgggagacgagaagaagctgggctcaagaacagaggaaaatgcaaacttcattcgcggtggtctccaagtggcgataccgcgccactctgggcgatctgattggttcgtttaggcatggaaggcgggaacaaccagaaaagctgcgctctggttggagttatgtcctaatattaaattcgaagaatttcttagtctcacaattgggcagggacgggaaggggaggcagagaatgaaagagggtagtttagagatgccagtaaagaatttttgtaaggcgctgtacgatgtacacagtgcttgcactttcttatctcatctactccacaaaacaattctataagtagatagtattattaccatttttcagatctgaaaatagactcggcagttaatacttgtttttccatagtcataaagcaaatctgagcctgcagaatccaaagacgaggagtctgaggagaaaagagagggaaggggcaggaagaaaataggagataaagaaaggaagagacaggagaaaacaggacaaacggatcagagcaagaacaaggcttaacattggctgggatagatggtacctgaaagttgttaggagggtttgcgcagggcgcgaggaacagaagcaaattagaggagctataatgtttggagggaggacaaaaatgaaatagagtacctaaacttaacgctgtaaatgctttgcacaccacttaataatgatggttgaatgtttaccatgtgccaggcatcaagctaagcattttattgcgtattttcacgcttaatcttcaaaatcccacaaggtagatattactattcccattttactttgaggaagctgagccttacagattaaataacttgcttaaagtactacagctggtgcacttgtgctcttaacgacagttcaactgtaatgtccctaattgtcaacaaggaataaggatgtacaaggttgtaaagataaactagacagctccttgagagaggagctgggcctccttcatctttgtgctcttcttgcacagtacagagcacagggtgctcagctttgytgaatgaataatgaacggaacactacattttaaactgataaatgctaaagtataatttttacacctcctgcagtttcaagttcatgcccaccttgtggcccttgagctggatgaaaaagtcttaatccttggtctgtttagtctgttgttaagttgcctttctctggactttatgtagttctttactgtgtatctcgggagtcatgtgccattcccaggctccaatgtctgaatattgaaaagccacccccaagatcatgatcactttcttcctaaatcttttactgcagctcctaccagtcacttggcactgaggagacagagatgagtctcacacacacagtgccctgccctaaagaaactcacattctaggagagatgggcaactaaatacgtagctgtaggagcgtggaatgargactgtaataagaagcacacagtaggttgggtgcagtggctgacacctgtaatctggcactttcggaggccgaggcgggcagatcatctgaggtcaggagttcaagaccamcctgaccaacatggtgaaaccctgtctctactaaaaatacaaaataagctgggcatagtggtgcatgcctgtaatccctgctacttcggaggctgaggcaggagaatcacttgaacacggaaggtggaggctgcagtgagmagagattttgcctttgcactccaccctgcacaacaaaagtgaaactccatctcaaaaaaaaaaaaaaaaagaagaagaagaagaagaagaagaaacacagttttccctgagctctggttactccagagtaggtttggacagtcaaaaatttcccctggagtgacagcctgggttgagatccagaaaataaattggagttagccagaagccatgaggggtcaaatcaaatcaagaaataaaatgtctccaattcctcagaagcccccctactaatcattacccattccttcctcccaaagggtagaccactttctgccttctaatatcatagattggttttccctgtttttgaattttatataaatggagttataaagtacgtatttttttgtgcctggcttcctttccttaacaatatgtttgtgagatgtattcatgttgtatgtagtggccatttttcatttttccttgctgtgtagtattctgttgtacaaacataccacaatgtataatggtgctgcgatggatattttgtgtatgtatcttagtgcacttgtgcatgaatttttgggagtatatacctagaagcagaattgctgtgtcataggtaacatgtataatttagtagttaacactagactgttgcaaagtggctgtagcaattttttgtttttttttgagacacaatctcactctgtcgccaggctggagtgcagtggcacaatctcagctcactgtaacctccacctcgtgggttcaagcgattctcctgcctcagcctcccgagtagctgggactacaggcgcatgccaccacacccagctaatttttgtatttttaatagagacagggtttcaccatgttggccaggatggtctcaatctcttgaccttgtgatctgcccaccttggcctcccaaagtgctgggattacaggcatgagccaccacgcctggccagtggctgtagcaatttatgtatgcaccagcagcctgtgagaattgctgttgctctgcttccaagccaactcttagtattgctagtctttttcatttaaggaatcctgaagcctctataacaatatctcagtagtaatttcactaacaactaatgactaatgaagttgaattctttttccatatgtgtgccatttagatatcctctttgtgatacctttttgtgttcaaatcttctacctatttttctatttggctatgttttcttatttgtaaagttccttatatatcctggacagaatataacactggaaagtttctaattttaatgtagtccaacatatgcattttctctcttacagaacatgtcagtgttggacagacattattggacatctcaatattgcagctctataattctgttttgtttttatcatatagatctgcaatgcatctagaacttatcttggtgtatggtatgaggtaggagccaagtttcatttttttctatatggatatacaattgacccagcaccattgattgaaagcattatcttttcctcactcctctgtttcacctctttgtcataaatcaagtgtccatatatgtgttttctggttttggtctctctattctgtttcattggtttcatacatttatgtcactgtcacactacctctgtagctatagcattagtctgaacccagtagtattttgtttgcagatttcttgtagaaagcagttaagagatttggcgctacacacagggcaggttaaggagtctgggttcaaatgctgatccttccattccttatctgtaaaatcttgagcaagttaacctctccataaacttcagttttgtttgtatgaggatgttatggggctatttatgccatagggttgatgaagtggctccatgaattgaaagtgcttagtacagtctgtcacagtgttaaagcaaactaaatatggcctgagaagggctttgtacttctatatttgagtccttrtggatgaactataacctagctttatagtcagacaaatttgaaaacttaacttaatagtatatacctgtaacaatagctgaatgttggccaatcccagcggccatacttcaacaactcatagactgccgaatgttcaaattgcattcaaataaggcaaacactgagctttaaccaatctcgctgtttctgtacctcacttcctattgctgtacgttagtttacctttttgtctataaatttgttctgatcacgagtcacccctggagtctctgtgaatctgctgtgattctgggagttgcccgatttgcgaatcattcattgctcaattaaactccttcaaacttaattcagccaaagtttttcttttatcagatggtgtcaggaatgggatctaaagtggagcttctagcgacccccaggagcactgagtgaacatgcaaggtacctgcaggatccacttgtgtctattgatctctcacagcagctggggatcacaggtaagctccctctcggatctctctttcctttcccttttttatcttttctattactcagggcaaccagcttgcccagagaycacgtgttgaaacccctagtcagacattggattaaagataacggggcccatctgagggcaaatataaaccttgccagtttgatattgagtgctaagcagagtggctaatgtctgtgttttatcacatgtattttgctctggccggaacaacaacaaaaaatttttcctttatgatgcggcttggcccccagtgtgatggtgtggcaagctgggtcactggggccgctgagggaaagggaacccagaaggctggcatgccagcaaaagagtaagaatttcttaccagtcagatttttggcttctctctctctgtgcaaatggttgaatgaatggtaaaaatcactgtttatttatctcttctctaaggttttgattaatgcaaaaaaaattctgaggttagtcttaaactgatgtatttgtgctatgaattcgtttttctgggtcaaggggtaccttaggataaaacacgggcttaggaccccacaagctcgctggtcaataacaaactttcctgcaggtccctgaaacacaaaaaaaaaactggatggggtctccatcttgttttatgtccttgggaacttgacctcgtaaccacgtggcagtactttctcttggtctccaccttctagggaacagggattttagggtttatgccatagttagctctaaaaattatcctgagtcattaaaagcctctgcaagctcaaaattaactactctagactccttctgggaagggcagtagactgctctgtgctgtggctcactggcctttcacactggcggttccagttccattccctgcttaggaagtaagtcatttctgatttaatatctgcataaccttctctagtctcttctcctccacagactatcttaaattttccttcctcgagcacctaggaagttacctttggtaaagttcaaaagccagaaatatcagccatttggcctgggtaaaatcagtaataagaaatttaaaaggactttattaaagagtgctatgcttaaaagtcaggttaattaaaaaatgaatattcaggctctaatggcctggaatycatgggaaaaacaggaggcaccagaaacccttttcctggccctgttcctccaaggactccaccataaagccaataaccaattaagaaacttaaaaactggcaaaagaaaaatcttacaactactatagtaatcttcttctgcctgtctgtctaattatatatgtattgtgtgtaatgtttatataaaagagctcaaattaattggcttaaacaaaaataagcacttaaatattttgaaagcaaaataaaaactgtaatgcctcttggttcatgtaactttagtaatctttgggaaataaaaacaactttaaatattattgwtaaagacattttgtctaaattatgcaggtcagatattagctttgctatatgcttcaaggtcataaactgctttgacttttgaaaattgttcaatttattttggagacattaaattctaaataaggcctggggatatatggaattagccatgccccctagctatacaaaggctataaagaaaatagatttcattaagaaaggatgttgtatggtaaattcttgtcctaaagtaaaatgactggttgtttaaaaagagggatgtttagggcaagtcagaaagtctaaacatgtcacacatagtctgtgtaagttgtgaaaaaatttatgaaaaggaattcatgccagacatgttgtacaatttaaggtgattaggcctcctaaatgcttcataaaatgccaccatgactcttaactgtacagcctgcctgctttatagctargtaaggcctgggacacctgtagttagatgctggaaagagtcggacctttatctgcatttctgtctgggtcctgggctccacaccyagtacataattaaaatccttacttaccaaggttttcaccaaaagtaaaagttgctaagagttaacattgtaatatgtaattgagagtactgaaaaaataggtttacatgcaaggtgtgtaaggagaatgaaatgtgttttttgtaagagattataagaaaatacaggaatgtaaatttttgcctaggttagagggttaaaggattgttttaaattaaataaagctaaaggtttgaacaagttgtggaaggtttataaaaattaattataggggccaggcacggtggcccatgcctgtaatcccagcactttgggaggctgaggtgggtggatcacctgaggtcaggagttcgagaccagcctggcyaacatggtgaaatgccgtttctactaaacatacaaaaaattagccaggcgtggtgttgcacgcctgtaatcccagctactggggaggctgaggcaggagaatcgcttgaamctgggaggccgaggttgcagcaagccaagatcacaccattgcactccagcttgggcagcaagagtgaaactccatctcgaaaaaacaaaacaaaacaaaacaaaacaattaattattaggattctatgtgtgaacatattggctaaagttaaaatggcattattcagtttttttttccataaatgggacaktggaataaaagcacaacagagttttcttagaagattgttctgctctgagaaaaaaaatagtaaagggttataaaaggtttataaaaatcttaccttatggtcaaactaattaaaactgaatagatttctaaaatattattaaaaactagctttaacattaaaaatacactaatggaaacataaaatttggttccctcttttagaaaggatttttatttaatattaaaagataatgaaaggtttttgtttaccttttaaataaacaacaaaaaaaaatggttgaggaaggaaagaaaggagatagtcagttggcctcatgctatcctcattggatcttgtttggaaagctgagtctcctttctatcaaaatactgttttttcctttaaaattttttaagttatcattttggctaaatgaatgacttatggtaacctaagattctattttgtaatatccaatgttttaaacctttggtatttaacaaacctttcaaaatcaagctctagattatcatgctaaataagccaatactaaaattgtttaaatatacaatttgaatgaactccatggtctaagtcaaattacctatgataacccattagctatcagtgctatgcacckaaattggagaaacaactggtattcaagaggacgtaagtcccgtgttaagcatggactcatgaagaaccaggatggccaccttgtccttcttgagtccttaaagcttttgttattaaacgttctggaaaagataaaataatccaaatttaatatattgatgtggtgacttataaattgcagaaataatttaaatccaatgtttggttccatattcctggaaagacgatcaaagcttcagatgcgtttggctacctgatgggccatttaaacatttataaagagatttcattcaattgtcattttctttttttttttttcttttttcttttttttttttttgagacggagtctcgctctgtcgcccaggcgggactgcggactgcagtggcgcaatctcggctcactgcaagctccgcttcccgggttcacgccattctcctgcctcagcctcccgagtagctgggactacaggcgcccgccaccgcgcctggctaattttttttgtatttttagtagagacggggtttcaccttgttagccaggatggtctcgatctcctgacctcatgatccacccgcctcggcctcccaaagtgctgggattacaggcgtgagccaccgcgcccggcctgaattgtcattttcaatgcatgttttctggttgtataaaagctttcccatgcaatagggctgatgttataacagtagattatagtgtattttcaccagacaaagaaaactttttatgattcactgaggacaatcccttcacaatctagaacctgcagattggatcgtctgagaacaccagagaaagagaaagactgtccttgccatccacactacagcaaaactttggagctttaaaccttgggttcataatctcacagctgagaagggtccctccacactcctggaactgtacatccattggaacccttaaggtaaaactaaccagaaaagtttctccccagaagatggcatccttgattagaatagcttttcccaagatcatagatcaaaacttctactatcacaagactcttatctttgaatattttttccttgtttatgcctctatgaacaatagaaattaaaagtgggtctattatatgcacttatagggtatacttttatttgtgaaggattttgcagccagccttaaacatgaataaccttatatttcaatagataaaagatgaaggcccaatgtaggtaacaaactttagtggtacatacattgcctcataatcagtcaaaactcctcttaacccacatcatggattaaagagaacattgacaagaggccttcactcttctagaaagacatccatttgttaggtcctttttccatggtttagaataaaagaggcaataatttgaaatgtctccctcataataggctctacagcaaattctactttaaaggctatcgttacacaacagactttaaattctcctttgaaaattatactaagtaatagaattggctaaacagaaaagtacctgtgcagctgttgacacctgtggcctatggagaaatacagcaaatgtaaattataaacaattctggccgggcktgatggctgacacccgtaacctcagcactttgggaggcagaggtaggcggatcccctgaggtcagragtttgagagcagcctggccaacatggcaaaaccctgtctctactaaaaatatgaaaattagcctggcgtggtggcaggtgcctgtaatctcagctactcaataggctgaggcgggagagtcacttgaacctaggaggtggaggttgtagtgagctgagatcgccgctgcattccagccttggtgacagagcaagactccctctcacaaaataaatacaataaaaataaatatccagttgtaggggattagtgaaaagaccacttagtcaagcaaggagactcttcatctaactcattcttcaatctatttaattttaggtggtttggcttatggggaccctgggtaaggagcatactccaaactcttgctattatccgcccgataatgataataatagtctccctggtgcactgtattctctcaaagattttaaatgcttgcatgcagccatctctacaacgtcaaatgatctcttttcaactggaataacaaaaactgaaagaaatgtgtgaccatgaaggcaccgtaacctatgaatgacatgctgagaccagaaacccaaaatgatgtaactgagagtggcgctaaggccctaagttctggtcacgctgtcacctaagtaagaacctggccaaaagtgaggaatttttttttaaacaaaatcatgggaggccattattttggactragctcatgcactaggcaccaacaaaccaaaccaaactaaaatggagtcactcatgctaaatgtgacataatcaaaccaaggctttaaaaaaacacaaaatgctagaacagaccaggttttttctcctgtaaacagatgtttcagaataaggaggtatcctctactcagcccttattctcttcctgcaaaacccactgttctactgtttcctagtgagtttcaaaaccatacaggtacacttatgacagcgataataacatcaatgaccaaggttttggtcaatctctcaaaattgagaaaatgaccaaaacgggggaattgttaaggcaaactaaatatggcctgagaaggactctgtccttctatatttgagtccttgtggatgaactgtaacatagcttaatagtcaaacaaaattgaaaacctaacttaatagtatacacctgtaacaataactgagtggtggccaatcccagcggccatacttcaaccactcacagcctgctgaatgttcaawctgcgttcaaatcaggcaaacaccgagctgtaaccaacctcactgtttctgtaccttacttccgattcctgtgcctcactttgccttttttatctataaatttgttctgaccatgaggcaccctgggagtctgtgaatctgctgtgattctgggggttgcctgattcgtgaatcttccattgctcaattaaactcctttatacttaattcggcttaagtttttcttttatcaacagagtaagctctcactaatgagtgggctgagtgaaaaytggagggatttgttcgtctttctcaagagtagtagcttccagaaggaaggggctgctcttcatttacatttcccttccactcccatcccttaatgcctaacatgctgcctggcacrtagtaggggactcagtaaatgcttgttctatggatcagttcagctatgaagtctgtgtgagccagtccaggtaaattaggaagacaaggatttaggactggggcgaaaagagccagarcggaagaaggacgccagggggagcaagaacctacactctccagatatcgcgagaggtcccgcgctcgccacgacactgagtgttctgttttgggcggaagcgctggacgagaggaggaattactctagggtacaaggcctcgccccaggagtggggggttgcttccgggtcgcgctcccggaaacaggaagttgcccatcctcctcgcccggcggcagctgtccccgaggcgggaggagcccgagggggcgcgagccccgcatgtgagtgactggggcccgaggctgggtggggggaggccgccctgtgacagcctcgccgccgcgcccgtctctgacatcctcgcgcagccgcttctcgccgctgctaccaccctctatcccagcgcggatcccttttctcagtctctccagttttgtagactgacagcatcccctggcagctcccccggggtcgactcccttaagacatctgtcactttctttgactccgccggggagagcaaaacgaggtggaccttgcttgaacttggttctcaggcatcacagcagtgtccataacttgascgttgctaatgaagtccagatttctgcccttttgacggaatttttaagaaattaagagtagattccccacccccttctgaaagatctttttctaataatcgttagggggcaataattttttttctttaaatgtgtacttggtatgtgataaacctggcatcttggatttcagaaagaaatatgacttggtttcttgacacaagtaaaatagttgtttgtaatcacctcttagtagaaggaaatttgcctgcgtcgtgttttgtagtattttaagactgttaaccgtgcaggccacactttctagtctcagagccctcatagcctttgtattcgcaaatatgtttcttttaaagtatttagtcataaatcactttataatagagactacttccagatacttagtattctgacttttctgatggctcatttggtagttcctgtggtgggatcttctatagacgtctctcccttaataaattcgttcatttgaatttgggttgtcaaaatttccctctagggaataacatgcctttaaaataataactaataaattcaattctgctacattgaagttttgactaaaggttcrtgtagcccaacttgcataccagaaagaggtcctgtttctgtcagaccttttctgccttggactgaggcatttttcaagacctgctttgaatacctgttcctccacagctactccacacaccagaaacaatgtccaaatgctagattcctaacctgctaaccttaaaccctcatcacattgttgctacctctgcgtttttttgtttttttttttttgagacggagtctcacactgtcgcccaggctggagtgcagtggcgtgatctctgctcactgcaagctccgcctccccggttcacaccattctcctgcctcaggctcccgacctctgcatttttaaaaatgaataaaataataaaacataaaatgaataaaccatgagccacgagttacattcaattagttcggaatgataattttaggtcctttctataaatttgttcaacattgatctgattccacatctgaggtgaattcccacgtctgttcttagttttttgtgttttctccatttatctctgctttcaagaaacactatttagggtgggaggtagacaggaaaatagatgtaatgccaagccctagaggtgcataggacaaaaactgaggtcagagtcttaaagagttcacttattggacaaagcactggagactaggctttttaggcagagraaattgtgtatgcaaaascraaaagatgtgaaatagtatgacagtgtagaatgtgaagaaggattgatgggaaatgaaactgaacaggtaggcagtgaccagatcataaagggccatggtaagtaatttggactttatcttttaaaaaagacaggaatctcattccatcacccaggttggagtacagtggtgctattacggttcactgcagcctcgaactcctgggctcaagctacccctcacctctgcttcccaagtagctgggactacaggcaggcaccaccacactcggccaatttttatttttattttttttgtagatacagggtcttgctatgttacccaggctggtcttggaagtcctgggctcaagcagtcctcccacctcagcctcccagtgttgggattacaggcatgaaccaccatgcttgacttaggactttatcttaaaatgattgttattaggtatttaatttgtctggctattggaacaaatgtgttacatcattttataattctctgaaataaaacattgtggggtagaaataattatccccattttatacatgaaaactgaggcttagagaggatgagtagtgtctcatggccacacagtaagtggtaaaatctagaatttgcatccagctttttccaactccagtatctgtgttcttagtcaccatgctaaactgctcctgcagaggatggggagtcttggaaggtgcttagcatgagccaatttgtgtttcaaaaaaataagtggccragtgcagcggctcacgcttgtaatcctagcactttgggaggctaaggtgggtggatcacttgaggtcaggagttcaagaccagcctggccaacatggtgaaacccattttttaccagaaaaatacaaaaattagctgagtgtggtggcgcgtgcctgtactcccagctactccagaggctgaggcacgagaatctcttgaagccaggagacrgaggttgcagtgagctgagatcatgtcactgcactccagcctgagcgaagagtgagaccctgtctcagaaaataaaaataaaaaactgracaaggtagagaatggattggggaagaggagaactggaagtatagagattaactacatctttgtgatggtccataggagagatgttgaagaccttaactgtgctgttaatgtagagaggaagggatgaatgtgagaattatataggaggctgaatcaagaggacttagtgatagtttcattggtgggagtgaggtaggaggagaatagtttttaaatttggaggattagtgtttccattaagaaaagaggtgcagtgggaggaatgagttgaaggggaaaacagtaagttgggttatagacacattayatacagggagctatgggaaacttggatcaccgtgtctggtaggcaggtagataaatgggtcttgaaccctagagagagttgtagactggagaagagatttgggaatcaccaatagctggtggtcaaagtgttggagggaataagaaggtcaaggataactggtggataccagcagagaacragagaattatgttaaggtttgagtacacttgagggaratagataatggggtagcaacagcagctgctgcagagaggtcagataaggtaataactgaaaaaaacgtccttcgaacttggcgtttagaaagccatttgtggcctcagtgaaagcaatgtcggtggagtgaggaggcagaaatatgatttcaacaggttaataaatgaatggaaacctgagaaacaagaaagtgtgttactttctccccccaacccccaaaggagctttcctctgaagggagggagggagagagtaccagaaacttagaaaggaactattatggcatttttctgatagtagaaactggaaagggtgaggatggaagcaagtagaggtaagcttaaaaatgtgaagacttcttcaagtatgtcaatgtcctaaaagaccaaaaaacaaaaacaaaaaaaaaaagaaaaaccacacactggggacttgttctgaagttaagtagattaaagagaggcatggcagccaaattcaatgtgtggtcattggttggatcctggatttttaaatagctatatgatctttttaaaaaaatttgatagttaaggaaacttgactatagactgaatattaggtaatattaagagattactcattttaatgggtatggcaataatgccaatggttgtgtrtagaataacgtcgttattcttaggagatgcatgttgaaatatttagaaatgattttataatgtgttgcaaataactttcaagtagttctggtaaaaacagaaagaaaatatagccaaatgtaaacaactggtaaatctaaatgaaggatatccaggtgttcattgtactatttttgtacaaaaagctttacacatttaatgtgtacagcttgatgaatttggacataagtatgcccttgtgaaaccatcaccatgatccatgccatcaacctatccatcacctycaagtttcctcctgccttcttacttattattactattagcaataagaacacttaacataagacctrccttcttagcatatttttaaatatacaatacagtattgttaactctrggcactgtgctgtatagtaggtctctaggagttattcatcttgtataactgaaactttgtattctttgcccagtacctccctgtttccccctgcctgcagcctcctgcaaccaccattctgttctttgcttctatgagtttagctattttagattaatcgcacaagtggtatcatgtagtatttatctttctgtgtctggcttatttcacttagcataatgtcctccaggtccatccgtattgttacaaatagcaggatttctttcttttttaaggctgaataatattccattgtatgtatatactacatttaaaaaaaaaattttattcttttgacacagagtctcagtctgttgctcaggctggggtgccatgatgtgatctctgctcactgcaacctccacctcccaggttcaagtgattctcatgcctcagcctcccgagtagctgggattataggcatgcgtcaccatgcctggctaatttttgtatttttagtagagacagggttttgctatgttatgttggccaggctgatctccagctcctggccccaagtgatccacccgcctcaacctcccaaagttttgggattacaagtgtgagccactgtgccctgcctgtaccttgattgtaaattttaagcatttattgtagttttaagttattactcttttaaatcgtattaatcatttcaatgttttatcagttatttttccttttaattgatgtttgtttctttgtagtggttcttattataatctaagaagcactttttctttttattattattatactttaagttttagggtacatgtgcacaacgtgtaggtttgttacatatgtatatgtgtgccatgttggtgtgctgcacctattaactcgtcatttacattaggtatatctcctaatgctatccctccccactcccctaccccactacaggccccagtgtgtgatgttgcccttcctgtgtccaagtgttctcattattcaattcccacctatgagtgagaacatacggtgtttggttttctgtccttgcgatagtttgctcaaaatgatggtttccagcttcatccatgtccctataaaggacatgaactcatccttttttgtggctgcatagtattccatggtgtatatgtgccacattttcttaatccagtctatcattgatggacatttgggttggttccaagtctttgctatttgtgaatagtgccacaataaacatatgtgtgcatgtgtctttatagcagcatgatttataatcctttgggtatatacccagtaatgggatggctgggtcaaatggtatttctagttctagatccttgaggaatcaccacactgtcttccacaatggttgaaggagcactttttctttactagaacatatatttaattaatgggatcactggataaaatagaatggaatatattcataacactaaagaatggataccatacttcatgggtagtgtaatattaaagagccaagtagagaaaaaagaaaatttaatttactctggatatagctcctagtgttgaagattgggatgtatcttgatggacttttgaaactttcttttgaactgtactgtttccccttttgtgctttaactagatgaatcagttttctatcctagagttacctcgctggcatagctcttcagaaaacagaacstccagggtaatggcatatcagtgttcaggacttacttatctctatagaggaattagttctctgttaaacagggcaaaagagaagtttacatttctcttaacttcttttctgctttaaagaaacatttgtattggtaagttctatcagagtttttctgtcagatatgcctctaccctgtttcttcataggcagagacccagaaggaattgtggagaacatctcatcagagctctcagttgtctcctcctatttctgaagtactccagaagtgaaacaactccctggcttacctccgacaggcctctcttgaaagcaaggtttcttgacctcgttttgaggaggggtaggaggaggttctcctgtgcattgcaggatgtttagtctttacccaccagatgctaatagtacccctccagtttgttgatttttaatttttttaaaagagctggagcctccctgtgttgcccagccgggagtgcagttgctgttcacaggcgtgatcgtaactcactgagcctctaacttctggcctcaagtgatcctcctgcctcagcctcccgagtagstggaactataggcatgtgctgctgtgcccaactcctgtccagttttgataatcaaaaatgtcttcagacattgccaaatgtcccctttggagcagaattaccctgagaactattgttgtaaagtagtgtctcttaattgggggtgtgtgcctttaatcagcagagaagaggcttgaaagcgtacrcacctgagctccactcctaacagttctggcaacttagcatatccgaggtggtgcatgatactttgatcctaataactccactagtgatcctgcctgtgcccttgcaggtctatgccactgttagaatcaggctaactcttcagaacttccccctgtagcaaagctcactttggccagagttggaactactttctgcaggtaagtggattgccatcaagcctcagccgatttcactcaatcctctcatgcttgatgcatagtaatgaccttatgtttgaatttttttttttttttgagacggagtctcgctctgtcgcccagtctggagtgcagtggggcaatctctgctcactgcaagctctgtctcctggggtcacgccattctcctgcctcagcctcccaagtagctgggattacaggcctccgccaccgcgcccggctaattttttgtatttttagtagagacggggtttcactgtgttagccaggatggtcttgatctcctgacctcgtgatctgcccgcctcggcctcccaaagtgctgggattacaggcgtgagccaccgcgcccggccttgatttttttttttttaagggatgagtttttttgttcttgtttaattaccatcgtatccaaccaaatcccaatagtgtccctctagcaagacaataaaaaatgtctccaggcatccctgggggcagaatcttttccagtttaggacgactgatataaccaaagccaaaaagagggcttatcacaatccacaggtattcttagaaacgtcactaagttgctattaactacctttctgataacttgagaaatgtgtcataatctctcggaagaaggatgcatggcttgcaaaaatatattcagtgttttaatatcattttaacttgaattacccaacaagaaaagaaacgtatttttttgtgtgtgatacaaactgggagtttaataagatttttatgtgtatcaaaaaggcttacaggccaggcgcggtggttcatgcctgtaatcccagcacttgggagtccaaggtgagtggatcactttaggccaggagtttgagaccagcctagccaatatggtgaaaccctgtctctactaaaaatacaaaaattagctgggtatggtggcatgtgccattttttattgtcttgctagagggacactgttggcatttggttggatatgatagtaattaaacaacaaaaaatatcatcctttaatcccagcctgtaattccagctgctcaggaggctgaggcatgagaatcgcttgaacccgggaggcggagctttcagtgagccaagattgcaccactgtgctccagcctgggcaacacagcgagactctgtctcaaaaaaaaaaaaaaaggaaaaaaaggaaaaaaaaaagacttgaggaggcttacaaaggttgcaaaacagccatcaaaaataatgatgattaatcctgttttcctcacctgtacttttgtccccttcaggattctcctaccggcacaccgtgttctcttctgtgtgtgatgttctcttctgcctcagggatacttgcttgtgaccccacctcccagcatccacactagtttttcactggaatttgtttctagcagtcctttctggatcctttccattctggtcctctactgagttttaatgggttttgactgggtattgttagataatgaattgtaacatatttaaatgaatattattcctacttgctttcatagaatgtctttgttagtttaaacaggaaaatggcatctcagaatcactgatcacaaaaccaagatgtgaaaaatgttgtaataagttatccctttactctatttgcaggaatcattgtagtcaatcattttccagttctcagccgctcagttgtgatcaagggacacgtggtttccgaactgccagctcagaataggaaaataacttggtaagggaggcagcatgcaacaaccctgaagtcaggacacttgggttcacatcctggcaagttatgaaacctttctgagccttgaacatgtatgaaatgggatcgatcacagctaccttatgggatcacagtggtgattcactgagataatatttccagagtgtttagcaaggcacctggcatatagggtgggaayaggaataggagtgcaattgaacatgagtcttcagtttctaatgaattgaatttttctccttcctgaagtgttcatagattcttagaattttagagcgagactctaaaatttgtagtccaatcctcttattttttggatgcagaagtagaccaagtaatttaaccgaaatcatctcactagcaattggcaaagcttgtctccaggttcaatgctgtttcatttttccagctgtaatatttgaatacaactctatagagaaccaaaaagtcattggcatggcaaatcatgccttgcttcttccctatggtgccatggtcatgcattgctgtacatctctgactcattttgtgcccagtgatgttccttagaagtgactgtgagaattttgtgattacaaaattgatacaggaaaagtttgggaaatatgaaagtcacaaagaaaataaaaaccagctgtgatctcattttccagagatcatctactcctgaattatttttaattggaaatgctacatcttaatttctgggggtttttttggtgttattgttagtatggctcttaatgctttgtaatccatcctcctggctgctaatcaaaaatggcttagtgaaaagaatgtggggtcgaaatgaggctcaggtgacaaccgactgggtggtctcagataagtcacttcccatctggaaatctactttatatctctatagatttgcctattccttgcaggtttgttaaaaaggtattaagaaaaaaaagatgtgtctattcctgacttctcatctaaatgcagctatataatctgtagtttttcgtgactgtcttctttyacctagcataatgttttcaaggttcatccatattgtatcatgtatcagtactgcattcctttttatcgtccagtgattttgcattatatggctctaccacattgtgattatcctttcatcagttcatggacatttggattacttccatttgggggctgttatgaataatgttgctgttcacatttgtgcacaagtttttgtgtggacatatgttttcatttgtcttaggcacatacctagaagtagaattgctgggtcatatggtaactgtgtttaactctttgcggaactgccaggctgttttccatagtggctgtaccattttatgtttcaattcctccatgtccttaccaacactttttgtctgacttcttgattgtagctatcccagtggatgtgaaatgatatctcactgtgattttgatctgcakttctctgatggttaataatgttgagtatctttttgtgtgtttattggtcmtttgtatatctttttttgagatggagtctcactctgtcacccaggctggagtgcagtggtgtaatcttggctcaytgcaacctctgcctcccagattcaagtgattctyctgcctcagcctcccagatagctgggattacaggtgcctgccaccacrcccggctaatttttgtatttttagtagagacagggtttcaccatgttgaccaggctgatctcgaactcctgacctcaagtgatctgccaccttggccttccaaagcgctgggattacagacgtgagccactgcacccagtccatttgtatatcttttctggagaaatggctattcaaatcctttgtctatttttttatttggttgtctttttattactgatttgtaataattcttgatgtattctatatagaccacccccttatcagatatataatttgcaaaaattttctcccattctgtggcttgtcattttactttcttgatggtattgagacacagaatttttgaggtttttcccctcctcttgtcttctacaaaaagtttttaattttgatgaagtccaatttattttttcttttgctacttgttcttttggtatcatatctaagaaaccattgccgaatcccagaatcatgaagcctccctctctgtgttttcttcgaagttttatcattttagcttataaatttaggtatttgatccattttgagttaatttttgtgtatagtataaagaaagggacaggcatggtggctcacacctgtaatcccagcactttgggaggctgaggcaggcgaattgcctgaggtcaggagttcgagaccagcctggccaacatggtgaaaccccgtctctactaaaaatccaaaaaaatttgctgggcgtggtggtgggtacctgtaatcccgctacttgggaggctgaggcaggagaatcgcttgaactcgggaggcggaagtggcagtgagccaagatcgcgccactgcactccagcctgggcaaccagagcaagactctgtctcaaaaaaaaaaaaaaaaaraaaagaaaagaaagaaaggtccaacttcattttckcatttgtggatatccagtggtcctagcatcatgtattgaaaataatacattaaaaattatatagctgtcccttggtatatgtagggtattcgttccagaatctccatatacacccaaatycttgcatattcaagtttcacagttgattcttcagaacctgtttatacaaaaaatcatccctctgtatatgtatatgcagtttttgcaccctgaaaataytgtattttcaatcctgggttggtagaaaaaaatcagcttttaagtgtatccacatagttcaaacccatgttgttcaagtctcaactgtagtttgtactgtctttttatctgaatgtggggggtatagtgtggtgggctcttctctcattcccccagttcctggaagtctagattgcatgccttttaatccaccattagaagtcttctgattctgatttaattgctctgagttgatgcccaggtatgagcatttatgaaacgctctctaggtgattctaatgtgcaagccaggttaagacctaatgaactaaacacttaatagtcgtaaagaggaccaaacaggagtgattgggaggcacactgctggaagaggaggtgtgctggcgtgcgctgggttgtgttgtaacaacatgactatgtcctccaccctacaggtggcagcatctccttactgagagaatacacgtactatgtcagtactttttggggctagaagtactgtaggaatgaagtatgcaaaataaaaggaccctctgtattgaaaataaatatataaataaataaagcccagtagaagagagcacaaacccgaagaagcactcttcttcctcctgtaaatgaagaaaaatattattgttctgtaacttaaacacctttttaaatagccatttaattattttatcttattttatttctctagagatgggatctcgttctgtctcccaggctggagtgcagtggtatgatcatagctcactgcagcctcaaactcctgggctcaagcagtcctcccacctcagcttcccaggtagctgggactacaggtgtgtgccaccaggccaagctgatttttaaaatttgtttttcttttcttttcttttytttttttttttttgagatggagtttcgctcttgttgcccaggctggagtgcaatggcgtgatctcggctcaccacaacctctgcctcccgagttcaagagattctcctgcctcagccgcccgagtagctgggattacaggcacccgccaccatgccaggctaatttagtatttttagtagaggcggggtttctccgtgttggtcaggctggtcttaaacgccggacctcaggtgatccgcctgcctcagcctcccgaagtgctgggattacaggcacgagctattgcgtccagccttggaactatttaatttcattttacaaatgatacagagagaactctactttgcyccattagtttttaccttttgttctctgggcatgatgaaacaatctgtctttaaaataactataggaacacaaattgaatttttaaattagttaaaaatcttaggtattttaagtatataaaatacaaataaaatgccctttattttctaaaattgtatttgtagaaaagcatgaggactctggttgctccagaagaaattaaaaaaaagaagaagaaagaaaagtgtgaggactgcaagccacatgccatggtttttgtgttgtctgaaatctttgctctgccaagaacaaagcttatcagcctgttgctctcagtaaatcaccttcagtaatcttcagtgatcagttcttcctcttgtgttgaacacaaatgttcaacaacagcgttaaacaacactgtgcataatccattttttttttattttaaggaatctccagtagcagatctcccatcattggtgtcagaaatcttttttggatgtcattagtgcttcagagtcccattaggatatattgtgctctagaccagtgctcctcagtttgcactagtttgggaactagtgcaggtctgtaaactgttcctggcccacagttaacgaatattttaaaacttgtatggcaatttgacattgtctctgtgtattcattgtgtttcatgaaagtattggtctgtagaggattgaggaaagcacaaaactggtccttctctacagatggtcaagtagctttgaagaggaagtacctaaagaaaccacctttctttttacatttattttctctccrtctctctcagggattttatattggaagacatggatcttgctgccaacgagatcagcatttatgacaaactttcagagactgttgatttggtgagacagaccggccatcagtgtggcatgtcagagaaggcaattgaaaaatttatcagacagctgctggaaaagaatgaacctcagagaccccccccgcagtatcctctccttatagttgtgtataaggtaaaatgtttcctgagttggtaattgcttcaacagaacacaaactgttcaacattcttcacaaatgctattgttgactaatcccaccactgagcattggtttttccgtgaataaattggcctttgctcttgttaccatgtgttactaggaaatttgactgtgttgttaaaggtcctagatgaaagctgcatatttacagttaaattatatttgtgtaatattattatttaattttttattatttgtttgtttgttgtgtgtgtgygttttgagacrgagtctcactcttgttgcctaggctggagtgcaatggcgcaatctcggctcaccgcaacctctgcctcctgggttcaagtgattctcctgcctcagcctcccargtagctgggattacaggcgtgcgccaccacacccagctaattttgtatttttagtagagacaggttttctccatgttggtcaggctggtcttgaactcctgacctcaggtgatctgcccacctcagcctcccaaagtgcttggattataggcgtgagccaccacgcctggccttgtgttttgtttttttttgttgttttttttttgagatggagtcacactctgttgcccaggctggagtgcagtggcgtgatctcagctcactgcaacctccgcctcccaggttcaaacgattctcctgcctcagcctcccaagtagctgggattacagccatgtgccaccacacctggctaatttttgtatttttagtagagacagggtttctccatgttggtcaggctggtcctgaactcctgacctcaggtgatctgccctcctcggcttcccaaagtgctgggattacaggcctaagtcatcgcacctgracagattttttatttttctagtcaaggtcacactgtgttgcccaggctggagtgcagtggtgccatcatggctcactgcagcctcgaactcccagactcaggtgatcctcccatctcagcctcccaagtacctaggaccacaggcatgtgccaccacacctggctaatttttctattttttgtagagatgggggtttttcygtgttgtccaggctggtctcgaactcctgggctcaagtgacttgagtccagtcaatcactgtcagactgagttcgagactgcccacctcagtctcccaaagtgctggggttacaggtgtgagccactgcagccagcctttatgtatgtatttatttattttttgagacagagtttcactcttgttgcccaggctggagtgcaatggtgtgatcttggctcagtgcaacctccgcctcccaggttcaagcaattctcctgcctcagcctcccaagtagctgggattacaggcatgcgcaaccatgcccggctaattttgtatttttagtagagatgggagtttcactatgttggtcagctggtctcgaactcctgacctcaggtgatccactcacctcagcctcccaaagtgctgggattacaggcatgagccactgtgcctggcctaatacttgtatttttggtagaggtggggtttcaccatgttggccaagctggtctcgaactcttgacctaaggtgatacacccgccttggcctcccaaagtgctggaattacaggtgtgagccactgcgcccggcccctttgtgtattattattattattattattattattattatttttttttttttttttttttttwtttttttgagatgcagtctcactctgttgcccaggctagagtgcagtggtgcgatcttggctcactgcaagctccatctcccaggttcacaccattctcctgcctcagcctcctgagtagctgagactacaggcgcccatcaccacatccggctaattttttgtatttttagtagagacagggtttcgccgtgttggccaggatggtctcgatctcctgacctcgtgatccacctgcctcggcctcccaaagtgctgggattacaggcgtgagccactgcgcccggccccctttgtgtattattattattatttttatttatttatttttattttttttttgagacggagtctctcgctctgtcgcccaggctggagtgcagtggcgcgatctcggctcactgcaagctccrcctcccgggttcccgccattctccggcctcagcctcccaagtagctgggactacaggcgcccaccatcatgcctggctaatttttttgtatttttagtagagacggggtttcaccgtgttagccaggatggtctcgatctcctgacctcatgatctgcccgcctcggcctcccaaagtgctgggattacaggcgagagccaccatgcccagcctgtgtatttttaaatggtgaattttaaaatacactgattatatggtagcagcttggtgagccttgcagtccctatagttctcaaattctaaattcttccagaagtaaacctaagtggcttgtttatgaaaatggattagttcttaaggcacattggaagtagcagaagaagcctgttttgttttgttttttttcttggtattaaggtatttgtttgctgggattaatgccttttctatctttccttgtaggttctcgcaaccttgggattaatcttgctcactgcctactttgtgattcaacctttcagcccattagcacctgagccagtgctttctggagctcacacctggcgctcactcatccatcacattaggctgatgtccttgcccattgccaagaagtacatgtcagaaaataagggagttcctctgcatgggggtgatgaagacagaccctttccaggtaaaatgcaacatttattacttattagatatagttttcttgacartrtatgataggaaaggaagtaacatttattgatacctaatgagaggcaagctccctatattgtatcttttaattcagtccccactaaaactctatgagatggggtttattatccccrtttcacagattaagaaaccaagggtcagagagattaagaaactcgctagaggaacatctggtagagccaaatacacacccccaaattccagaacacacatgatggggacaaatgtctttgcccataaaaaggatttgattgtatctcatccttttctctcctgtgattcctgtccataatgcatatttaatacataggtattggtttattgaaagcaaccgagttcagcttgcttctaarggtcctctaacagtccttggcctattgggctaggtttttgtctgggtatatcccactctttcagtttagtccttctgtctgtcacagctcatttaatttagtcctctaaagtatatcaattttgccagtaagtagaawttaaaaaacacataaatttagtaacagtgcatcggtggcataagaattcatagtctgatagactatttgaggggtttccttttgagaacagtgttaacatgtaataagagttgaaatttactttttcaggctgggtgtggtggtttacaactataatcctagcaatttgggaagctgaggcaaaaggattggttgagcccaggagttcaagaccagcctgggcaacatagcgagaccctgcctccaattttktgtgtgtgtgtgtgtgtgtaaagaaatttactttttgagaaagggggatattattttgggatttttttggtgatgtttatcttatttggcaatgtagaataatatgtgtattaatatcacaaatggattatagaatttattgtgtaaccatgatccgaaacttttagaatgtgtcttaaattttaggaaaaatgctttcagaaaaaatgtatttaagctttataatcataatgtcattctctttttttttgagttggagtctcgctctgtcgcccaggctggagtgcagtggtgcgatcttggctcactgcaagctctgcctcctgggttcacgccattctcctgcctcagcctcctgagtagctgggactataggtgcccgccaccacgcccggctaattttttgtatttctagtagagacagggtttcaccgtgttagccaggatggtctcataatgtcattctttaagatctaatgagtcataaaaatcatcccttggattgggtctccatcgaaagctatttttgtatacttgaggaagtcatggaaaggtttccaaaattgtatcaaaatcagaggaagggaacattgtaagacaagaattccacctcaggagtttttgtttttttttaaaaaatcaacagctcagatatttcatttgaaaatttcagatgtaacttccttgtatttattgggaaggttgcttttgaaatgtcaccaacagagctaaaaaaaaaaaaatgcagtctcaaactcctattagaacggttcaaagtgtttggaggaaacagcgagagaaacttgtcagttaggccagtctgtgcctcttcctcagacacaccagtctcctttcctgactgtcttcccctcaaagcctccctaacggcaactcctgatgagttttcctgacctggttgatggcattatcttcttccccagtcctataaagtaaatctccatacacggttgaactgagaaatggggcatcgtcaatgaacactgctcgcttcttctctaaatcatagtttaaacattccagaaacattagtgtcttgtaaacaagcyggattatttggactacttcaaatcaatattttgccttgcagatggaaataaaatgagtccttggagctcagttgtagagagagcgagtgagcattggaagggtgtggctttagctctttaatgttgttgattctattaaagtgctgtttttacttgtaaatgtggatgtggaagcaccatattttcctatgtatgataattctgggaagctgtagacatgtgaaactaacagcattttgygtagcatttggaagaaaagttaaaaacrcgtaattatatgaagagtaaacagaaacacatgagggagaattaagtgcaacttaatctgggcctgtaagagggcaggaaaagtaaaaatatatcattttttaatgtcctggtatcaaaaaacaactaccttcaggttaggattagttggccatacatttaaagtaaatgcaaggggagaatggtgtgacagattcccgaaaggaaaccccatatggtttcctgaagtgctggcctgtctcacactcccagggtcatctggtgctccttgcagtggcacctcgggaatgatggagggcagctgcagccttggtgatgtacaagaggcaccaccaccaatgactggaagtttcccctgaccccacccagggaacaaaaaggtgacagaggtggggttctttttctagatttcagccttagataggaaatcctgcccctaaatgctctcaataagaagaatgaagtgactttgcagcgagtcatggaaacatcccgctctgcagcaaaaaataagtaaataaactgacagttgtttattacttaccagatgccagaccctgttcagggggctttccatatatcggcttatttaatcttgacaacatccctatagggtagcttcaggttttatgcccattttacagatgaggacactgaggcacagtatggttaggtcacttgctcaaggtcccaggtctggtcacggagccatgatttgaacccaggcagccagtcttcagagtctgagcccttcgcctctgatgtgagtagtctgtagctgtgcagtagacctgaagagtctagctttaagtctgatgttggagttctaccactgtctctctcggatcatcagttactttctcttaactccctagtccctgaagagacaatattctttctggctgttccaaagataagtggtcttccaagcttctgaccctttagaattttcccgacctggtgttgtcttagacattcagcccagttcatcctccctagtctgcaccctgacattcagcccagttcatcctccctagtctgcacccttatggataatatttgactgacttaatccttcctcttactgacccagagttttctctttacattcacattcttactgcttttctcccctcctggcttcatatctttatagtcactttactcctgccggccatccccttggtttttaccatttccatggaatcattgagtcttaaagccagaaaagaattttagagttaatctagtacataccccattttataaaagaggtaactgaggccaggagaggtaaaggagcttgcttacccagctaaaagtggcaaaatcacacttgaaccctagtttcttaactccctctagcattctgtccaagatatcacacttacagcctgccatctctgccctcagtcaagccaggcgctagcatgttcagccaattattttktttactttggtcattttctggccaacttaaaaataacatattcatttctactgaggaagcctgggatagttctcacatacagtgaaaaggcacacatttggaactcgatgcatcccgtaaccttcaaaggaaggatgaagtagatccagcaacatcaagaagttttggaaatagcaaatcatttattggcctcaaactaagaatctagtaagacttagagagtccagatctgtgctcaaagatgaactgcttagaccgcaaggaaaaccttcctcttttatttgcaaaataagcttaccttctgtgataataacagctctgtcaagcacttactgtataccaggtactgtgccgtgcagtttatttctcagtcttcacagcagtcacataaggtagatactgtttttatgttcatttcaaagatgaggaaactgatgtgcaaggggattgactgacttatctgaagtctcacatttatttatttttaattttttcttttgctgtgtttttgataataaattttcacatttagaaacaaatttttgtacaagtgagaactcatgaaaatagactttctctgtggtttggagtggttcaartgcattgcttcctggaggcaaggctgttggtgaaatgatttyttgggctctttccctctacggtgtgtgaaaatggctctgggcatggtgccacacatgcagggacctggcagaagcctccttcattgtcaaggcttcacccctgcctcatgcccggggtactagaagaggtgctatgcacaaacaagcttytggagagcagcctgattaaatattgagcacacactagtgaaagtcatgggaactttgtcatgggctttgcagggttttcttggctatatttataatgcaagaaatgatgaagttatatttatttaatctttattttgaggtttctgtgaatccagattgctcatttgatttttctccccatggacttaattctattgttaaagcttctgaaaaatcagccttcctgcctgccttcctgccttcctccctccttcttttcctccttccatcccttcctccctctccccaacttcattcactcattcagtaaatgtttattgagaccctgctatatatgccaggcactgttctcaacaaagcagtgaacaaaacagacaaaaccactgctcttgtagagctagtattggctttgttcttttctttcttccctatcctttttatccagagggagttttttgtcctggaaagaaatcttttgttttgttttgttttgttttgttttgttttgtttttgccaggtaaataatctatgtaacagtactctccccactcagaattccaggatatgttatggttgtctacagagaaccagcctaagtgagttttcttgtaaataactctcaggcaccaggaagctccctgatgggtgagacgctggcccatccatttttctgcccagtgcccaacttgtaaagaagggtggatagttatggtctctgcacgttgacttcaaggctgtgttttgtctgagagactgtttttgacatctccaacagtgaaatcattccaaatcatagtgaaaacttgaaatacaagttataagctttattgaacttttatatgtaggatttctcttctctgtcatacctttaaaaaatgtttaaaatatctggtatgagggatatctggagtaaagaagccttagaaattaaaagtaggaagttgctatataatttacgctgacttttctgtctggtgcttcaggaaaagtggttagaaacaggagggctggaaagaagtgagatgcagcatattaggtagtcaaaagccgtaaactagggtggcatgggctcggctggctgtgtgctgttggctgtttcccaggatggaattttgttcactttgtggcatgatggctccagccagttgtatagagaacacrtcagacaaaaccttttcagatggacagaggccaagctggagtctggccacatctctttctgttgtcagggactctgtggggagaggargaggagcctgcaccctacctccacccctagttcaccgtttgcccgttcctctctctaagcttatgctttatccaccttggtgatctcaggctacagagaaatcaaaagtagttctttcttttaaagtttgggctcccttagttcaggtggatggcataggctaccccattccagtgatccttttttcttgttacttcccttccttctttgcgggccaccagcctggccacctctgctcctgtcagatacctctctggggccagccttctgagatgatttacctctacacttcagcattgaattctcagcttcagttttcatgatctccaaggacattttgacttggaaagtacataaaatacatgcatacaaagacagtaagaggtgtaatattttgatatttaaaaatacttataataaagtaatatttctcatctctatccttttaacttttctactcaagcaactgctaataataacttggtatacatccttctgagtttttccatgtctatacaaatagatatacttaatatatataaatagaaatacttttttgttcacacacatacaaaagatctcatatacatatttttggctagacacattgtattagtttctaaggctgctgaaacaaagcatcacaggccgagcagcttaaaacaacagaaatccagtacctcacagttgtggagtctagaagtcagaaatccaggttgatagggccacgycccctctcaaaggctctagggaagaatccttcctggcctcttccagtttctggtggttttcagcagtccttggcattccttggctgtgtcagcataacttcagcctctgcctttatcttcacgtggccatctgctttctatgtgtgtctttgtgtcttctgtcttcttctaaggacatcattcagattggattcagggctcatcctacttcagtatgacctcatcttaaatgactacatctgtggccaccctatctccaaggtcatgttctgaggttccaggaaaatgtggattttgggaaaacataattaaaccctctctatatatttttgaggattttatattagttgattctgtgactcttctataatttaaccattttctagggttgttgtgggttttttttttttttgctattacaaaaatatgtacctgagagattcatatacacatatctttatatagatatactttttttctgtaagatatattcttggaaatggactcgctgagtcaaagggcatgtgcattttaaattttaataaatgcaaccaaattgtcttcataaacttataccagcttatactttcattaacagcatatgttgatcattgacactggatgttgtcaatgttttgccagttagaaaactaaataatagtatctcatttcaagttgcatttcattgattattagtcaaattgcatgtcttttcaaatggtttataggccatttatatttataatacttttctgtgaattccttgttcatattttttccccattaaaaatttttttatctaccctgggcaacatggagaaaccctagctctacaaaaaatacaaaaaattagccatatatggtggtgcacacctgtagtcccagctactctggcagctgaggtgggaggatcacctgagcccggggaggtcaaggccacagtgagccgtgattgtaccactgcacttcagcctgggtgacagaatgagagcctgtctcaaaaaaaaaaaaaaaaaagttttttgttaattcaaacagaggcttatatattagaaatactgattatttgtctcgtatatgcaaatattggtcaaatctgtccatttttcctttatagcctctaggaagccttccttgtcccaaagattataaaaatactcatttctcagtcctcacaacagtcacttagggtagatactgtttttatatccatttcaaagatgaggaaactgatgtgccaagggattgactaatttatctaaagtctcacatttacagacacatttttatacaggtgagaactcatgaatatatgtgaactctctatggtttggagtagttcctctagcttttttttttttgagacaggatctcactgtgttcccaggctagccttgaactcctgggttcaagagattatcctgcctcagcctcctgagtagctgggactaaagtgccaccatgcccagctcctktagttatttttaaaattttatgttatctatttgtatcttttaatcaatctagaatttaatttagtatatggtgaaagggtaggaatctaactttattttcttccatatagatggtcacttgtcccaatttgatttattgaatctaccctttcctcacttaattaaaaatctatgtttatcctttattggccaggcatggtggctgacacctataattccagcactttgggaggccaaggcgggtggattgcttgagctctggagttcaagaccagcctgagcaacatgatgaaaccctgtctcttccaaaaatacaaaaattagctgggtgtgatggcacacactggtagtcccagctacttgggaggctgaggtgggaggatgacttgagcctggaaggtcaaggcgacagtgagctgagatgtgccactgtactccagcctgggcgacagagcaagaccctgtctctaaaaaaaaaaaaaaggctggtctcaaactcctgggctcaagcgatcccacctcagcctcccaaagtgttgggattacaagcatcagccaccacccataaatgttttatcttgttaaatttattgctagttattatgaatgagattattttccatttcagtttttaactgattgtggccagtagagtaagaaagctattgatttttatgtatctgaaaatctgtatcttgtattctgtcaccttattaaattctctttttagtactaacagttttttacttgtgttcgcctctaactttcagttccctcaaggaacaccacctccaagtttttcttttagtttgctattcctactttctttttctttcttgatttccctttactgggttttcttctacctgctttttaaagggatctccacctggaaatcccaagaatatctaaagctctgaataaaattaaaattaaataagttaggctgggctgggcgcagtggctcacgcctgtaatcccagcactttgcaaggctgaggttggcggatcatctgagatcaggagtttgagaccagcctggccaacatggtgaaaccctgtctctactaaaaatacaaaaatgagccaggcttcgtggcgggcacctgtaatcccagctattcaggaggctgaggcaggagaatcgcttgaccccaggaggcggaggttgcagtgagccgagatcgcgccactgcactccagcctgggcgacagagctagactccatctccaaaaaaaataataataataataattaaataaattatagttaaaataattctcctaactcttaggttaagagctgctcggtgctagcccatgcagcacctttatacaaattcgaggaaggtgcccctttctcctggtgctttactctcatctcctgggaagactgtcataattaactgattctgttggaatatgacacgctactacagaaaagtgtcataataaatctgcagatgacgttccctagatgagcactaatgacataggtgataccagagatctgcaggtttattatgacactgaccaagaggacagtatagtgcaaacattcacagtagtgctccttggggctgtagatttcatcttcactgcttctagaatccaccccttttttccattcccactgcctcattcattatatttcacttctcatcacagtgaacccccmccccccgaccttttccctaaaaaagggcaaaaccaaaatataaccagatcttccttttcccagcctctctcttctagggcaccctaatcacaatccagaataatcttcctagaacatcgagaaattcctgctcaaaagcctccaacagttcctctttttgttctgagtagagccagacatgcttcaagccctggaagccctcaccacatcttcctctgcagcctgtttccttacccaaacccccactgcacgcccagcatctgctgtgttcttcctgccacactctggcacctcaggaacttcctatcacctctaactttcagtttgttcatccacagaatgagaatagtgattcctcctcagtaattacacagtgaaaattaaatgctataacatgggaaagtgactaacatagggcaagcactcagtgcattagcttgctttctccttccccttccatcgcaagtactttggaaaccgaaatgctatataattgtaacatgttgttatgattatgccccatggtgtgtccattacccagagcttttgcatattggcaagaatttatcatatttgacmctgaataagaagcatttgaaaatattggagaagaaaaaatgcaactttgcagcctcagtgtgccactgaaacaggtggtactaaagggttttcagctacccccagagtactgtgggaggagaggcgccctcccaggagcagggtgtagcggtaatcctctgactaataatcttcctgcgrgttgagactggctgagaaaggtaggtggcagttgcctccaggaaacacagayactatcttcaagagatggaggatgctcagcagaccggccaagaacaaacacggtctttccctgacgaggatttcctatgccccactactactgcctcagagaaaacaagcatgtagtgcttactgccaaccacagaaaatgttttgtggttaagagtcagtttccaagtatgtttattggtttaaaaaattgacttcgtttcagccacatttggttgtctgttatcatttgtcgtaggctctctcctgatttggtttccattgggttttaatcagaaccgtcttctgaaacgttttagattcaaagcagagtttaaaacaaacacatctctcagagaacctagacgaaatccaaaatggaacagaaagtraacaagaaataatgaaataacattataaacagcatggtaacagagggaagctgggaaaggctgtgcagaaacaagagcccctcagagaaggagccaaaccagacaggcatgtcagggagccgctgtcacacagcagggtctgggttgggggtcttccatttctgaccagcatgtggggctggaaactatggctggcggccccaccccctcctgagctgggatagagggctgtcttatggacagatgcaattcactttattccaaagatggctccagaaaagtcctgtctaccctctccatccctttcctcttctgtgtccttttctcactcttccttcccggagtcctggctcccatgtgtacttgtgaagcaagggtctatgcacacatccagcatgtgtgagaagtgcattagggcacagcgataataggggtcacccttctatccacaccagcccccctgtgctgtagacgtttcagccatatgggtcataggttagaaaatgttgggggaactacatctttagctccacattgctgaatgtttttcctagctgttatgctttatttgttgatttgatttaggaaatgcatgacaggttaaaagatattttccacaaagtgtaaaaaggtatacagagaagagtacctctccttcctgctcctgtcctctactccctcctcagaggctgcttcatatataccttaccttttcagcggtctccagtgcttatcattgtttgtttttaaaaattattatgggctggatgcggtggcttgcgcctgtaatcccagcattttgggaggccaaggtgggcagatcatgtgagcccaggaattcaagaccagcctgggcaacatggcaagaccccgtttcaactaaaaatacaaaaattagccatgtgtggtggcatgcgcctgtagttccagctcctcggaaggctgtagcaggagaatcccttgaacccaggaggcaggggttacagtgagctggacggcaccactgcactccagcctgggcgacagagtgagactctgtctcaaaataaataaataaataaaagtcattatgatgtctttcctttcttgtttcattgytggagctactggatgtaccagctatgctctttcagtatctgttttctccatatcccttcctctctcagactttgacccctggtggacaaacgactgtgagcagaatgagtcagagcccattcctgccaactgcactggctgtgcccagaaacacctgaaggtgatgctcctggaagacgccccaaggaaatttgagaggctccatccactggtgatcaaggtgagcagaagcctgagtctcccgctgattggctgcttgcttaaaggctaggtcaagctctaggaaatttctgacaagtaactctgtgttgttttgttttgtttcctgccttgccaagacgggaaagcccctgttggaggargagattcagcattttttgtgccagtaccctgaggcgacagaaggcttctctgaagggtttttcgccaagtggtggcgctgctttcctgagcggtggttcccatttccttatccatggtgagtgtgaaaagggccgggcacagtggctcatgcctgtgatcccagcactttgggaggccgaggcaggcagatcacttgagcctaggagttgcagaccagcctggccaacatggcaaaaccccatctctactaaaaatacaaaaattagccaggtatggtggtgcatgcctgtaatcccagctactstggaggctgaggcatgagaatcacttgaacctgggaggtggaggttgccatgagctgagatcgcgccattgccctccagcttgggtgacagagtgagactgtgtctcaaaaaaatgggggggctatgggggcacttagcgtgcgagtaggaaaggggcagaccagaaatacctgcaaaacagtaatagctatcactgagccactaccacaggcccaacactttacaaatccaatgctgggatcccactgataaaccagtgatgagagataaaagggatggatgaagargtgtgtcagaaggaggggtgccaccatgggggggacagcaagtttgtctaatagagtcataatttatttcgaagtatgcatttagcattttatgtagaatggggcctcatgcagggggctgaagagagagtgcaaataatagaaggagaattgcattttttggcacttgtttctgccaggcagtgtggcttggtgcttagtgtctgtgtctcactggggacactgataataactctggaaagtaggaatgattgttgtcattcttcagatcagacaagtggggatcagtagctaggcgtggtggctcatgcctataatcccaacactttgggagtctgaggcgggttgatcacttgggcccgggagttggagaccagcccaggcaacatagggagaccccatctctacaaaaaatatccaagctacttgggaggctgaggtgggaggatggcttgagcctgggaggttgaagctgcagtaagccatgatcataccactgcactccagcctgggcgacaaagtgagaccctgtttcaaaaaaaaaaaaggttgggggagggggaaagaaagaaagaaaaatgggaaacagagagrttaagtaacttgcctaaggttacccagccaggatcgaaaccccagtttgtcctgctgttccttcctgtgccctgcggaagacatggttcattccttgtggttaaggttgctgtctagtaagaaaagaaagccagtttccatcttagaactgtttcgaaagaattaaaatgactttttcaggctttttgttaatttcttaatgcttctrtctttctttaratgtgctgtttgtttgcgtgctagagtgcccagttgaacaagctgagcaggcttccccctgcgtctccctgtgcctcagaagaagggtcatgctttttgtcccttcctcctyctctcttctccccttcccccgcctggcctgctgttacttcagtcttttccaagatagaatgaatagattatttctttccttccaatatatattgttttagctgcaatttagaaayactccacccacatactcaaatcatggctgtagagtttatgcctgtgtgtgtacacrttatagttcattgactctgtgcarctattcttcagggacctagtacttaagatactgtactcatatttttccctctttrcccaccgcccacagttttcccacccttacttggctctctcttagtcatgggctggcttgaccagtttaattactttttttctgtttcatacttctacaggaggagacctctgaacagatcacaaatgttacgtgagctttttcctgttttcactcacctgccatttccaaaagatgcctctttaaacaagtgctcctttcttcacccagaacctgttgtggggagtaaggtaggaaattttgagaggacttggtctagaattttctttatttgggacctggactgatgtcataaccaaggccttccctgcatattggcttagagggttacagggtgaattgaggggacacccacacagtctagttctyccctcctgctgctagccaggagacttgcaggggcccaccttgtcatgaaggcaggtttccagaaaatctagttaccttgcaaatctgcctcctgcccttaacacctgaggcaaactacttttctatattaaaagaagtgaaatcttaaaatttgaaggacttgagggtgcaattagtctggctttcctacyttaaattagaaagtaggcaagcagccatgatcggtggtcgctcacgcctgtaatccagcacttggggaggctgaggcaagaggattgcttgagcctaggagtttcagaccagcctgggcaatatagggagaccctatctctattttttcaaaaaaagaaaagaaagctataaggtaatagtatgtggatgaatagaataactgctccattttgtggataaggaaactgagycccagagagattaagtgagttgcccaaggacacaccctttaccctctcacccccaggatggtttttgccagaaataaacaattaagagatttcaggtagagaacttgaaaggcaaaaagtgtgggagcctgggaaggatttgataggcaggcagcccagctggggtagaaaagcccactctgcccccatcatttcccacttcagtctggggccaagtgctcagagccaaagttacctctctggggccagtggactgggagaagctgttctgcatttgtgtctgtttacttttctctgaattgctccttttgttgagtctcattcctaaggaaggtttttgagcctggatcggtttgggagaattaaaagcatgcattttccttcataaaaaaataaatttcccaaactatggccccctgccacctctggaccatggcttccacctcctgatactatcgcttggctccaaatttgctgaattgtgttaaaggaatttaaaagcctataaaaacaatcattttgtctagaagtaagaagttctgtctgccagcactggggtggagatgctgggctcttgcctcagattttaaagaagtttatcctgctgtcgccggctggaattccaggcccttgtatgatttcatcttcataaatataattctgggacacggctttatctttctcttggttttaccacttgaataccaaagttaatttctccagcgtgtgcaacaccaaggagcccagccaaaggagtaaatacagagttactcaaatgcttacgagagtcatgctgtggttctcgaggatgttttgggaagggcagtggccagacaggcaaaactcttgagaacccagtttcttagagaatctgtttccccaccctggcccaagctcccctttccccgcagccttgttaccccaccctgttgtccacatccctgggccctgggccctgggccctgttaaagtcacgtgtctgtgggcccagtgtccaaaggcagccttgggacagaattggggagctggttgttaagtggcactcggggagaaggtgagggcctccaaggcccacttcacccactccacggtgtggcctagggctggcctgtgccaccctcttgtctgtttcttcccatcctgggaatggatgaacatgaccctgcccacttcaggcctgtgtgaagaagggatacagccacttgttttggtccttctgagattgttttgaggactacagatgttaaggcttctgccaatattagtaccagtcaactgaaggctagctgaagacaccaggctgtccctgtcaccacattagccggtgaaatggctctggtgttgccatgaaaacattatgggcaaggcctgtggcagcagcagagagaacagggttggggacaggggaagatggggccaaaacccaagactctggaggccctgagtggtgaagagaaaaccaagacatggcccagggagtcagacttctggctcccactttatatgggcatataaagggtttctctgaagggcaagagataggaggaagagatgagagaagaggccctaggggttttctgtcatcatcaaggtaaggagaaatgtcccagcaagacccatctctctctttatccctattccttgccctggtcccagccccaccccagggttcacagctccttccctggcacatagcaggttgcatttaatgcctgttgctggcagtakcatgccctcagaggggcagtagttacctgtgcaggtgcatatgctgattgtctccttagttttcaaaatcagaggccagtcttagtgtcattagtttttaatcggtagcatggcatatctgctcccctgggtcttgccaggcagtgtaaacttaaacttgctgctgtacaattcttatcagggccctggtagtaagaaataacattccatggaagagtgcccaaaggatatgctgattatctatttatctaaaaagttttcatcaaaccagaatctcagaatgttgtatacttcagccaccatgtgctggtttctgctggaactacctttgttaaattgcaattaggtatttttctttggcttactttgaagctgtggctaaaaatagttgcaaattacaaagctcatgcaggatctactctggggctctcgttgagggtattgcccactaaatcacacagtgcctctttaggagaacccatagaagagattttactctggtcttagtaccaagagatgccattcttaggagaaagtagtttgtttttgtcttttggacataattgcaaatttttgttattggttctatttcctctttgcttatgctaggaaactcagagccatatgtgaaagcatttttatttactaaaccccctggttttatttcrttttctttgccttccttttcctcccctcctcattctttcctccagatgcataagatgcctgacctatttatcattggcagcggtgaggccatgttgcagctcatccctcccttccagtgccgaagacattgtcagtctgtggccatgccaatagagccaggggatatyggtatgtagggccccaggagggcagggtcaatggatctttttagtttttaactcaaaagctattttaagaatcacatactgccttcacaaaagttttatttagtagaatcaaaaataacattctcctgttaacaggctcaatatttatgcttagaaatgaaacaacttaatgagaaaacatagcagaaagaaatggcttgtacatacaacatatagaatgcgtgtgtctattgatcatagaaacttcaagttaggaaggattctggaaaatatttagaccaatccctcgttttatagatgaaaaggttgagacccagagaggagaggtgaccaccccaaggccccactgtcagtcgagcagagcgtcaggtcttaagtgcctgcttgaacacagtcaagccaggagagggacaatcaaggactacaggaatatatacccattttgcaaataaaacaataccaagcagtatataagggcaatggtcacacaaggaaatgttaccttctgtgtggctgccacagccaagtcacagcctcacattgatgactcacccttgaccctggctcagtgtttgcccaaatgtgacttgtcctgtgccttatatcctaattaaaaatctgttccaaagaaacaggtttgaatccactgctgtcagtagcaatctgtttgacagccgagtttwcttggaagaagcaaataaatcagcgagtgtcaccattgacctccttgcttttcctgcctcacaaaacctaggcaagacctggagtctctggcagagcccagactggttttccaattgatttcttttaattttacccattcagaagacccccaagcccctagaaacctkgcatctcatatgagggtaggaattggactgcaagctatgccaagtcttaatttaggttacataacttttatttcaattcagaaatgaaaaataaaaataaggtacaaatcaagcattaactaataatggagcacagctggcctggctcttgggaaacttcctacaaaaacgaggattcttgtatggaaatcgttctgaatctttttcctgtaatggagtgactcttaacacaagagatgactattgcgaaaatctctctggcatatttaggtttggagcatgtggttgtgcttgaacaagtttctgttttatattttacaaatgcctaacaattcagacaactacagaaacaccttagttatctgaattccagacttccggctcccacgagcaaccggaataccaattacagaattagggaaaaattaaaaaaaaaaaagtctggcagtgatcaagaaagcttgagcatcaaatgctggtacagatagtccagattagcctaacatccggtgcatgatacctgctgtgctgtgcctggctggtttgttgactagaaagaaaggacccctatagttggcagtgtctataaaaggccagtcacatgacagaacacagagatggatggggactgaagagaagaagaagaggagagcaagtctgggagaagaatgggggcagggaggggtggggaagccagcgagcacctgaagcagtgacagaaatagacatgatggctgtcactgccacggttaacaatgaggacaggaaagcagaccctgaccaagaagaatcattcagtgttacaggacagatggcggttcctctaccttagggacccttaagaatggcaccatgacatgcaagttctatgatttttgacaaaatgtacattttcctgtggagatggaggggagaggggttccagatcaccagaaaaccttttgggggtcaggtacaacatctgcagtcactgtacaggatagtcattgcccatcatgaccaagtcaccaagtaaaagttgaattctactcagtgctcttcatttaaagatgagcagggcccatagtacgctagaataaatttcccatcaagagattttttttgtttaaaattttattttcttatggtaaaaacacttaacatgagatctaccctctcaacgaatttttaagtgtacaagacagyattgttaggggctgagcagggtagctcacacctataatcccagcactttgggaggccaaggcaggaggattgcttgagcccaggagttcaagaccagtctgggcaagatggtaggaccttgtatctacccaaaattacaaaattagccaggcgtggtggcacacgcctgtagttccagctactcaggaagctgagttgggaggatctcttgagcccaggaatttgaggctgcagtgagctatgactgcaccgctgcactccagcctgggcaatgaagcgagaccctgtctctaaaatcactgaattaaaaatttttaaagccatgcgcgatggctcacgcctgtaatcccagcacttggggaggtcaaggcgggcagatcacctgaggtcaggagttcgagaccagcctggccaagagatgatgaaaccccgtctctactaaaaatagaaaaaattagccaggcatggtggtgtgcacctgtaatcccagctactcgggargctgaggcaggagaattgcttgaacctgggaggtggaggttgcagtgagccgagattgcgccattgcactccagcttgggcaacaagagtgaaactccgtctcaaaaaaaaaaagaaagaaaaaaagaatttttaaaagtattgtaaactataggcacaatgatgttcagcatcactggggattattgaaaggttgaagtttttaggtttaccttcatagcccactcaaatgataggtcagtgtttcctaaacgattcttcagattactcatgaccccacaggtgggaccagaaggcctttgaaaagacccttggcaagtagggtctcgagtcagtcgactttgggaaatgcctgtcttgttgatgcatagtacattattagtgtatcaaagatgttgaaaagccttggggaaacctagtgtttctcaggcttacttggccatggaacctattttctttggaatatcttacaggacactrctgtttgccaaacccaatttgggcaatgctggtttaggtttaggttaatctggatgttctgtaatgaaaccacattatagatagacacaggaaaattggctagtaggtcttgtgtcccctcggaatccattctgtcttcttgctgtaaaagctgagacttgatgcccaacagcagcctcatctagagcatcctgcctttgtaagcctgctgaattgtgattcacagttccctgggtgaggggtggtgataaagcatttaaagaggactgataataactaggaatacttakgctaggaagtgccagaagactttcagagcaatttgtctttaagccaggtgtagtggcccacacctgtaatctcagcactctgggaggctgaggcaggagratcacttgagcccaggagttcaagaccagcctgggcaatatagtgagacccctatctcttaaaaaataaaaaaggaaagaaaaagaaaaaaaaggaaactaaattaaatagaaaaagatttgtctttgactctgcagtgcaccctgagggccagctctggcagacctgccttgctcgtgcccacaggtgtgcccaccctctgacatttacatgccttcctcttgctatttcccctcaaggctatgtcgacaccacccactggaaggtctacgttatagccagaggggtccagcctttggtcatctgcgatggaaccgctttctcagaactgtaggaaatagaactgtgcacaggaacagcttccagagccgaaaaccaggttgaaaggggaaaaataaaaacaaaaacgatgaaactgctttctgggggttggttacttagttacctgccctttgcatgcatgtgtgaaccagctgtgagctgcaaggcagtggccagagcctcgccctcctgactcttcctgcaggtggctcaggaaggattcagcctggccacttggctaggactctgccagcacccatctgagactgacctcttccgggcctttggacactatgaccttgatgctgcccttcaggcaggaaacagggctggtgcctttcttcacctgcatggccagcttccttccctggcagtggagagggcagccaacaggttctaatgtcagagccatcctttaccaggtgggcctgcttgtcccygtcttgcctgccacatcactctactttttggaaggccatggctgattaaagaagttcttgtagtttcccaagcaaagtggaatctagaaacagtgaaaaaagttcagataactttgaattgcattcaagaagtacacttctttcccattgtccgtggctcttggagtctccgtgatgccaggctagagtctgattatataataattcaaaatggtaactcccaaggtaatgctttcttccatttcatcaggttcttttatccccactgcaccccctccccttctcccttgcctatctggatggcttctcagaagctcggccctagtcctccctgccttggcggggccagagcccactactgctgaggcagcactgctctcgtcagctgtgttgcctttaccaagtgtcttcagagggttatgagttagagtagctggcctggggagagggtgcctccctgggtttgatcttyagggtctgactttctgcagagaagatgttttacagatgtgtcaaagctgatgtaatgtggttgggggaggaaatccagacccaaagtgtttgtcagctgggtgtrcaactgcctatgtgatcctctgtcttaaaatgatttctgtctgtgctgcgaaacaaagacaaggtgaggtgtttttcttttttgtaataatataaagctgtgtgtttctgattggatgattcactrtgtgcattgttttctcctaagtgcttttagtaggtagcaatcaaatggtgtaaataaggatgttcttttcctgttccttttatttttttctctctttattattcttttattgacaccactagatagctggccactggtcatgccattgccaagatgaagaaaaagcaaactacactttggcctctggttctgaattgcagaaatcaaaggatgcagtaggtgtctatgtcagaattatggatcagaggcagacaatgacgagtgaagatggttgtgaagccctcttcattcctggaggagcctgcatctcatctctcaggccctctttctctgtgggtctcatgaacagcagtggggaccattgagcacttgaatggcctgtttgtctatgggcttgcaaaggacaagcagagttcacagagctcaggatagaaacatcagagcctcctccacgggcttcagtgaaactccgatgaactgtacctgagggaattttttcttaatcaaccccttgtgtggatgaatacaggaacaacaaaacttgtgtacgtatgaaagtcatgttgttaagcagttatgatttaagaggttttaagtcagagggatcatctggaggccggctttgtgcaagcttttacagccttctgcagtgtccttaccctggctgtacatggggaaggrctatgtgtaaacaagtgctttagaggcctctgagagtttttaaaaatcagacccrttaacaaaagagagggtttcttaggaacaaagcaactattttgattactgagatctctgttttgtttctgtgagttactctgtattcctttccccatttcactcttgcccttcacatcttaaatgtccataagaaacccttgcatgtgttggtattctgaggcatcccgtgggaaagtcccctaagtcccattttgtacttcaacaaaaaatgactgtagcagaagataagtggagacttttatggatatactactcattttacttaaaatctacccagttcagacttgaatgtaaacttgtattaggggaaaattctccaaagagggttttctacatacacagaagcagttcaacttctcaagttaattttgataagcagaatctactactggccagagcgacaggagtggctaggggttgccagccagtccctttctgatgatcaaggccctgcacagcaggatgccacaggatgcccctgccatctagctggaagcatcaaaagtccctctgtatgacccggtgtgggaaagwgggttgtcaggatgagaaagtggggctgcagggtgacgataagaccacctaaccaactccccacctccaccaccacaataagracaaaactgtagggctctaaagagagggggtggtttacaagtttattgagcatttactaggaagtgacatggcgatgacctctgtacatgagttaggttcactttcatgtggcctcccactacagagatgcgtatgcccagaagtcagctctctgaggagacaggctactttkgccccagtttgaagcattctgtccaaatgtcctgagctctccagcagtcaagtagtgaatggataccatacttattatggttgatgaaaaaaggcagagcttatcctcaattttttttagggaagagaaggaataaaataaaagtggttcaagctgggcatggtggctcacacctgtaattgcagcactttgggaggctgaggcaggcagatcacttgaggtcaggagttcaagaccagcctggccaacagggtgaaaccccatctctactaaaaatacaaaaattacccaggcgtgatggtgggcgcctgtaatcccagctacacaggaagctgaggcaggaaaattgcttgaaccggggaggcggagattgcagtgagccaagattgtgccacttcattccagcctgggcgacagagcgaaactctgtcaaaggaaaggaaagaaaagaaaaaaaaaaagagagagagaaaagaagaggggaggggagggaaagggaagggaggggaggggaggagaggagagcagattgggggggctcatgttctgagagaaaggaataatagcatttgtctagtacattccagtttacaaagtgcctgatatacatgatctcctttaatcttcacccaatcctgtaaagtaggtgttagatccccattttgcaagtaaataagtggaggcttagagcagttaaccgctggcaggtaggtagctggttccatagcacatcattttcctgcggcatcacggcatggtgccgaagaagacagctgtggatgtcgttgactcagatgtgccyccgttggggtgggagaacccagggatgggggtcagcaagccaggaactccgcagggtttgtttttaaaactctgctggacagaagtggaggaggaaagaatctaaccatatgacttttataaaaatcctttcacttttcccctccccatttgaaaactctttttaagagtgaatgtagctgaaacacaactgtgtccagccattttcctgtctccacattcttccagatgtgtgacagaggagggactctgctcaattccagttgtgggtccccttggagtttacatcacttgtttttcaattcttggttttctgttcccttctaccaaaacccagcataggactcagtgtacacttactttaaaacaaaaactcacatttcttagctgcaggtgatggcctcagtcattttaatacagcctggaatgagtttgcttattacccagtcactttcgtagtgaatgttcaaaccccaaagcaaatgtttgcatctccttgtccataaaggagaaagccaggttataggagaaagagagagaaaggcgcatgtctgtttgcacagagagaggcaattttgtctacctttcgagaatcagttataaacagaagggcctcttaggattttgagctctcctgacaatgaaggaaaagctctcttgagtatacaagttccacactcattacctttcagtggtgacccatcacccactacaatttgttgaaggaagggagtgtcagagatatgctttaaagttgtactttaggctgaaattctctctgtatttggacctgcagatgttgtgtacagaaccgatgcatggcagggtcaggaagctaggagagtgaaggcgcttgtggagacrgctctgtagcaaatgaaacacggaagcctccgggaatgtgtttgtgtcaccagcagcaggcatttccctgtcctccccacccccagtctccacatccccagcagcctcttccagaagcatgtcagggagacggacaggtgctctccttctcgtgcaccacatccaagtccacccaccgtggacgcagtgtgactaaatgctgsccttgaagagaaaccctcagccagcttgtctgttgtccaggtccctcagtgtctctggtttccctgccctgcataatttaagcattagtgcyaaatacatctgtcatattcctctccctggagactgygaaatgtccagactttttcagactagtggagggaaggaatgttacataactaagtggaggcctggaactgtcaggatttgacagggctggaccagagaccmttccgcctctgcctagtgtgtctgtcaggcaggcagcagccatcaatccaagaatgagccatggcggcaagcactgtgtggagaaaggaacccagccgaggtctgagtttcagacagaaactggggagttgggacatcttctctgtgccaggcttcattgacaccatcgctccccacagcagctccttggggcagggggctcacctgtgcagccacccttactcacagtagcatcccattcttcacactgcaacccsscagcactgtggacccttccagggaggtgacaggagccagcagacacatgacattcccagaaagccccatcttatccagacaggcttccctccatacttctttccacagttttaccctcagaaaaatgttggctgcagtcttcccttccttcacctccaccctggggaagggtcagtaaccaatgccgagggtcggggaaggaggagkcacrggcaagacagggactcagcgcagtgctcccrccatcatcggggacaggtgccagggtcagctgcagctctccttccgggagcagggtgtggtggccctggatggtcccagggagcagagggaggcaggcagctgtcacagccacagcggctctgaatggcttgagcttttagtatgtgttcaagtgcaggatactacaaactggtaaagacttccmccatgtgaagaatgtatgtaaattaaagtttattgtaatgaaggtttttactttttgcaattaaaagtgttggttgataagaactttcctcttgttggtgtcattctttaatttccagttttctcttgtttccccttctcccatgacatgagagacttctagccatatcttgctcatgaggccggcctgtggggctcctctgtgcccgcctggctttggtctctaccatttgcacccagcactgtccttgcattcacagcctccactttctccgcaccccagacgttacccacagcggcttctcatctgctattcccatgaattctcaaatctcagtccccctgttaataccctcccctgtctgtgcacttcacccagaatgcaggtgagcccctggacgcctttttttttctcaccagcttgctgcacacagcccagatgccctcccagtgatgcctcacccacggcgtccttggttctcgcaggacggccaggcatgtgtgcgggactccaggccccttgctggctcaccccagctgcccccagatgacaggctgctctcagcacttagttaactcggtggatttcagtcagacatttttgtgtgtgttcattttttagccattatatatatatatactttcatataaatgcataaatatgaccattttttatatgctgttaagtgtcctcctgtttaatttttctctgttacttgctgccccttcctcttccccatgttaccccaccccttttcctagtcaggtaactgtgatatatacacagccatactctgccgtgtatttttccataatttcctccatgctctctaatcataaacaaggttttgttactgctttaccgaaaatgggatcatattacaggccctttctttgtcctgcttttcttactcaactcctcacagagttctcttcaggtcagctggtagggctccagtcccttcttcttgatggttaatactccgtggcgtgggtgtgctgtcatttattctgctgttgtcttattgatggtaagtcacatcctgttaaatgattagtcgggctataagtcaagaagtctggagtccactttaaaatacttgtttttacaaaatgtccattcttgtttgttccaaccctaatatattttattcaggaataagatatattattcctttccacaattctgttcatttacctgcttgaaaactggaattcagccctccccaaaaacggggcggggggtaagggcttgattccctgttaaaacatgatgagatagcctgttttcagtccccttctttctccaccccactatagcatttgatactgacttgtggagaacccgtccctccctcccttggcctctgtggtactcactaccccttcctggacctcttcttcctactctgtctcctttgtaggatcgtcctcttctgcctgtctctgaaattttggtctctcctatggttctgcctgcagtttctccctgggatatctcaactccatgcttcaccctccagccatgggcagatcacctccagtctatgctcagcccacacctctcacttgagcagtagccctgtgcatccacgtgatgggaggtcatctctgccaactccaaagcacctctacatcaccatgtccaaaaagtctatggcagccgcaaggggttcctctcctttttcttagcctctacttctgaccaggaccaagctcaggacaatcctgcctccttatcacatatcgagctccactgctgctgtctctgtctaagagcttgcttcactcttagactctgccagtaattacctcactggtttctcgccgcacattccccatcccaattcaccatccatgtagctgccctgatgtctggtcacctcccttccttgctcctcagtgactctccattgcccacaggagaagtcctggccaccactccagcctcatctcctttgcttccccttctcatctcctgtgcccctcctctactggaccatcctaattcctggaaacgtccaggctggggtttttgttgtttgttaatttttggagcagttctaggttcacagcaaaattgaatggaaagtacggcgagttcccatatatcccctgttcccgcatgtgcacagcctcccccactatcagcatccctaccagagtggtgcatttgttacagtcaatgaacctacgttgacaggtcattatcgcctgaagtctatagtttatattaggttcacttcactgttggtgttttacatcctatatgggtttggacaaatgtatgttgtcctgtgttatatgtctgccattatagtatcatacagagtagtttcactgccctaaaaatcctctatgctctatctgatcatccctctctccccactaacccctggcaaccacagatcttttactgtctccatagttttgccttttccagaatgttcaaatagttggaatcatacagcctgtagcctttttagactggcttcttccacttagtaataggcacataagtttcctcaacatcttttcatggctcaatagttcatttctttttagtgccaaataatagtccatggtctggatataccagaatttatgtatccatctactgaaggacatattgtttgcttcccaagttttggcaattgtaaataaagctactaaaaccattcatgcgcaggtttttgtgtggacagaagttttcagttcatataactaaatacaaaggagtacaataattggatcatatggtaagagtatgtttagcttttttttttttttttttttttttgagatggaatcttgctctgccacccaggctggagtgcagtggtgcaatctcagttcactgcaagctccacctcctgggttcacaccattctcctgcctcagccttctgagtagctgggactacaggcacccgccaccacgcccggctcattttttgtattttcagtagagacggggtttcaccgtgttagccaggatggtctcgctctcctgacctcatgatctgcccgcctcggcctcccaaagtgctgggattacaggtgtgagccaccgcacccggcctaagtatgtttagctttttatgaaaccattgaattgtcttccatagtggctgtaccattttacagtcctaccagcaatgagagttcctgttgctccacagcctcaccagcatgtgtcagtgttttggatttgggccattctaataggtttgtaacaccttactgctttaatttgcaattccctaatgacatacgatgttgaacatgttttcttatttaccatctatatatcatttttggtgaggattccagatcttttgctcattttttttttattatagtctggttggttgttttcttactattgagttttaagagttctgtggcttgtcttctcatttcttgacattgtcttttccagagcagaagtttttaatttcagcaaagtccagcttatcattggtttcttcatggatgatgcctttggtgttgtatctaaaaggtcacctctataaccaaggtcatctagggccttctcctgtgttaacttctaagagttttatacttttacattttatactcacatttagattcattctgagcgaatttttatggaaggtataaggtctatgtctagattcattttttgcatgttaatgtccagttgttctagcatattgcctttgctcctctgtcaaaaatcaacactttggctgggtgcggtggctcacacctgtaaccccagcactttgggaggccaaggcgggcagatcacgaagtcaggagtttgagaccagcctggccaacatggtgaaaccccatctctactaaaaatacaaaaattagctgggcatggtggcgggcacctggaatcccagctacccgggaggctgcagcaggagaggcatttgaacttgggaggtggaggttgcagtgagctgagatcgagccattgcactccagcctgggcaacatggcgagactccatctcaaaaaacaaaaaaaaaaaatcagtatctttatgtggatctgtttctaggctctctctctcgtggtcttttgatatatttgtctgttcttttgctgataggacgctgtctcgatcactatagctttatagtaaatattgaagtcagagtggtgtcagtcttctaccttgttcttcttcagtattaagttggatattctgagtcttttgcttcttcatttaaacattagaatccgtttattgatatccacaaaatagcttgtgtttgattttgattgggattgcattgaatccatagatcaaattgcatccaggcggttttaattagaagttataattcctagcccatgatgtttttgaaattcagtatgaatttttgcttagtttgaattccatcttattactgcacattcctgtgacatgacacatgtcctttaggctttcttactaaatcaaactgacaagcctctagacaccatgctgaagacagacatttcaccaatcttattttttcagaataatgactctattatttttttaaaaataatacattcttattataaagaactgaagacagtttgggtgatcttatggaaacctccactcagtgccaggtgcggtagcttacagctgtaatcccagtgctttgggaggccaaggggagagaccgagagtttgagacctacctgggcaacatagtaagaccctgtctgtacaaaaaaaaaaaaaaaaaaaaagaaaaatttaattagctgggtgtggtgacgcacacctgtagtcccagcctcagcctcatcgcttgaacccaggaggttgagactgcagtgagccatgattgcaacactgcactccagcccaggcaacagagcgagaccttgtctcttaaaaacaaaaaaccaaaaaccacccagagataactactaacattaggtgaacagcattctaggtatgtctaaggtatttctaggtagaatgctaaatagaaatgcttatattaaaatgctattttaaaaagaaaagttctgaatctaattttatgtgaatctaacaggagaaaaagaaactgaagtagatgtttcttccccacaaaaattagtagttcccaaaagatctccctgaagttaatattatgagaaacattaagaaactagaattgttcttaataaggtttcctttttagatggcataatccaaggctctaaagataaggaaatagcttgctctttctcctcaatttgtttattcctatattgattttgtttttaaagtctatgcatttccttctgctctgaaaccttaattctcaccacagtctttttttctttctttttgaaacaaagtctcactatgttgttctcaccagcctcaaagaatcctccagccttagtttctcaagtagctgggacttcattttattttatttttatttatttttttgaggtagaatctcactttgtcacctaggctggagtgcaatggcacaatctcagctcactgcagctctgcctcccgggtttgagcgattctcctgcctcagtctcctgagtagctgggattacaggcaaacaccatcgcacctggctaatttttgtatttttagtagagacggggtttcaccctgttggccaggctggtcttgaactcctgagctcaggtgatctgcccacctcagcctcccaaagtgctgggattacagatgtgagccaccccgcccggccttcattttatatttaaactgattttgtggctcaccaccagtatttttgccattgcttcttcatttctgagttgttatttttaaactcttgattgaagtccagccacagtggctcatgcctgtaatcccagcactttgggaggtctgggcgggcagatcatttaagttcaggagttcgagaccaacctggccaacatggcaaaaccccatctctataaaaaatacaaaaattagctgggcgtggaggcaggcgcctgtaatcccagctatttgggagactgaggcaggagaatagcttgaacccaggaggcggaggttgcaaagagcagagatcacaccactgcactccagcctgggc

SEQ ID NO: 97081 - DNA, 18148 bp, Homo sapiens
tgagatgactgcagccctgtgagaggcaaagctagaggaccaggctaggcggcagctggattcccaacccacagaaactgtgagacaatacatgaatattgttttaagctgctaaatttggcataatttgttatacagaaacagattaactacaacaaatcccctctttaggaaagtatgtatgtgtacaaattctagtacacattttagggaatcttgaagtctctctgaagttcacaaacagaactgctagtgacccagggattccagattaagaaacttctaacatgataaacttcgaacaatatgcacaaaaggcctataggaacaatttaaccatgctatgtggcataacaaatgttagaatgctttccttccattaagtatgaagaaagttaaatgacttcaaatatattgatatcttagtaccagtattaccaaaggtaaaatcaaaccaagtggtaccaaaacattattttggaataaaatatttcataggtactgaagaatgataaaataactgagacattgtcctcaactttgaggacttcactatctagttagtgagacaaacacaaacatacacaggaacacacaaaatagctatcgtaacagcagtacaaataaagatttacatatagtatccactcatgtacacagtaaagtgactttactgttataacataattaaatacctgtactgtttttccaagtcccatgtcatcacccagaatgcaccctcctccatggatgtagtgtccataaagaaaccgggttccttctctttggtagtctctcaaatacctattgatggtataaggaatagagtctccattgtcagataatttaaaagcaacagaagatgatggaaattttcggtttgggaaataaggtttttctaaatcttcatcatcaaatataagattcctagggcaatctttaacaaatttcacttcttgaagctgtttaagaggtattttcctttcttgaaaatctgcatataagacgactgcaaatgacttgccattttcatccactgtgatagattttatgcttgcttcacaaagttttccattatctggagaaggggcaagacatctttctcctggatgccatatgtctgcaagaataaagaaaataaagtttccaaagctagcttataaagtaacacctcatttattcacagctgtgagaaacaatatatacctcacataaatgccttttccaaaaaactggaacaagataaattctaacatgtatagatatttttctaaaatagattttcagatattctcctataataaacagaataaagggtacatactttatttccagtggttcttaccctaactgtgtgtcatcatctcccctggagtttaaaaatatacattcttagacaccacctctagtgattcttattcagtggataggggtcacgggcatctggttttattgttttgtttggttgttattgttgaattcaaaagatcattctgacgcacagccagggttgagagccactgactaaaatattcttcctgactcatgaacatatatatatacatatatttcatgatatggtagagtaatcgtgaataggacttggtaatgagtaaactaaaatcctctggacagcaatgctttgtggttcatctgtcttttttacagttattccattgcctttctctagaaacagctgtttcttttcactgcaatattgttgcctctaagcctttactttaaccactgcttgtatacagctaaccatgggaacctccaattcaactacagtgatgtcacagcttttcctcttccgggttttgaatatttactttaagagatgaattctaagatctctttctgcaaagatcctattacactttaaagagtattacctctctctttatgaacttattctgtgactaaccatacagctattttattttcccagaaaatataccactatgaatgaggagggagtccacagtatactattggtacaattaaaaagtatcaaataaagaaaactaagtaaaaataattttccaaatggaatttcttatggcaagaatccaaaaataattctatggctacaaacataagaacactaggaattatttttcctatacatttctcactgagatcagataaccactggcagtttcctagggtcttcctgatgacctccagttagatatttataactacaacatgacatgtttatactatctaaagcaagaatagctcattaaattcctcatccatcagttgttccttaaaagtaaagccactaactttgatgaggttattttaccataacaataatgagtacagagggaaaaaccttctctcccactctactctctggacccaaactgttgacaactgttacaccattctaaaagagtgttttaatgtcaaactaaagcctcgatccactgtacaagtagaacaacatataggtcaatgggcccaattttcataacagtactatttgcaccttaaaacctaaagcaacccttacagcaattcttaacacattacttatatttcccattatgtgtttgcctaccctatcatttcttaagacttattttattatctattattcaacatatgtgatttaagcacaaattattcaccaaatattataccacacaatgggtataaaatgaagaaaactaatgtcaaaaatgatggtgactaatagtcttcctgcatcttattaactggcatcatctcagagaaatgcaaatcaaagccacaatgagataccatctcacaccagttagaatggcgatcattaaaaagtcaggaaacaacaggtgctggagaggatgtggagaaataggaacacttttacactgttggtgggactgtaaactagttcaaccattgtggaagtcagtgtggcaattcctcagggatctagaactagaaataccatttgacccagccatcccattactgggtatatacccaaaggactataaatcatgctgctataaagacacatgcacacgtatgtttattgcggcactattcacaatagcagacttggaaccaacccaaatgtccaacaatgatagactggattaagaaaacgtggcacatatacaccatggaatactatgcagccataaaaaatgatgagttcatgtcctttgtagggacatggatgaaactggaaatcatcattctcagtaaactatcgcaagaacaaaaaaccaaacaccgcagattctcactcataggtgggaattgaacaatgagaacacatggacacaggaaggggaacatcacactctggggactgttgtggggtggggggaaggggggagggatagctttaggagatatacctaatgctaaatgacaagttaatgggtgcagcacaccagcatggcacatgtatacatatgtaactaacctgcacattgtgcacacgtaccctaaaacttaaagtataataaaaaaaaaagctggcatttaaaaaaaaacaaaaaactggcatcatcatctaaccaacttttcaaggtagaaaaccattagtcagcccttaaacctcatttaatattactccttacatccaatccatcggaatatcctggttctacttcaaaaatgaatcactttcctccatgccactatctctctaaagcaaaggctggcaaacattttctctagagtcagttattagctatttgttactttagattttgtaggccatacagtctcttgcccttgtaatgcaaaagcaaccagacaatacataaacaaatgggcacagttgtgttccaataaaactttatttacaaaaaaaagtgtcagaccagttttagcccacaggcagtagtttgcagacctctgtcttaaagcatgccaccatcaactttccctaaattatgcctaaccagtctctctgctcccagtccacctatttagcgtagggtacccattattctctatctcatcattttattgcctctgtagcacttatcataacatttaattatcatgtccacttgttttttgtcttttccttccagtagagagtaatttcctttccaagaaaagtttgtactgttataaattttatccccaggaccaacacagagtcacacagcagacattcagtgaacatgcgaatttattacacattcttttttttttctttttttttttagacaagagtgtctctgtcgcccagtctggagtgtcatggcacaattatagctcactgtaaactccaactcctgagctcagccatcctcccgcctcagcctcctgagtagctgggactacaggtgtgcaccaccatgcctggctaaattttttatttttagtagagacagggtctcgcttatgttgtccaggctggcctcaaactatcctcccgcctaagcttccccaaagtactgggattacaggtgtgagccatgcgcctggcctattacaaattatcaatctcacaaatccttgatatcttgcgagaaaactaaaaagtacaccaacatatacataactgtaaaaactgcattggaagaagagtgctatgagaagggagtattgagaaatgtaatttaaaagggaaaggggtctaagaactgtatctcagataagtgtacagcatgtgcaaaaaaaaaaaagccttaagggaatcacacaacttattggagtattttgggtttgagttcggataatttctaggacgaaataaattcagttgagttagaaatggaatctctcagtatccaaactacagaacaactgcttaaattgttaagatttcctgttggatttaacagggaaatgggttaagtctcctaaaatttaatgagtcgaaatcatttgttttggtttaaactaattaccaactcaactcattctggtgatagggtctctctctccctctttcactccaaaggcctcctcaagcattcctcaagggtgttcccacctcggggccctggagctttctgctccttccaccaatttccctaaataccaagagtgactagatttatcaaaaggaatgagcctcccagtcacaatatccactcggcagcttcatctatttttagctgccagtctcctataggtatttatatgtttggtccctgaattacagcgtcatcaattcctagacctcagaattcaggcttgtaacttgccctctctgaactttagctctgaattcatctatttaatgagatcgatatcttcctcaaaggaaagcaagtaaacaatcagcatattgctgggctcaggaaaatcactcaatacctggtagcttttgttatacagcacaattattaatgaaaactactcatttgggtgccagaaggcatcccaggtgacttgtggtagataatcacaccttctttaaacctcctatttaaggcagaatataatgccctgactcaatcggcaataaaactcaactgaactaaatatctcaaccttcatttatctacttacaacaaacttctgccattcactaacaactggggcatacaagaataaagaatgaaaataacatttactgagtgcttaatatgggccacacgcggggtcacataaatactttgcgtattccccacgtcatttaataatcgcaagaacctagtaatgaacccagttttacagatgaggagcctgcccaaagttgctcagcaagtaactgtcagaggcagcactagatcccaggggctgactcccgagtccaggttctcaacactgaatcggagatttggttccaggcctggaggggttcacaatctgcagctgtcactgaagaggatctacagggcaaaaccccaacccgaagggcaccggcaagaactggtccaacgcgacgcagtacacaggcctctgcgtaaggggcgagcgcggagctggtacctttgcctgaggtttccgcgcggggctgtggcgccgacggatccatccggccagggggaggggccgagcccggctgcacgtaacacccggaaggcggcggaggacagcaaggtggctggccggcaggccaatggcggccaacgccacttccggccgccctccgagcatcgctcttcggcaacccgaagccacaggatggaggagggggatcccagcaaaggtagcgactaaggggacccaagcagaacgggagggcgacgtccggagcggcggcagagccaggggacgctgtgtgaggctggcaaagcggtgttcacctagttctctcgggctccgccgccgccggaggaggacaggaggccggcaaggcgacccccaaatcttcctaggctctgacttccgtctcctaacccccgcaaattccaacccggtcttggaaaatcccgcgagaacgggctcccgaattgtcattgggatctcgcgagaacgaaatcttcctttctgtgggcggagcaatcttcccgatgtctcttccctctgaggccagtagcaggaagggcctcgggagttgcgagtgtcgcgaggtttgaggtcgctcggtgggccgggcgctgtgcgaagctagaaataactgggggcatggagaatgcggtggctgtaaagggccgctgaggcggtggaggcctggcagagagcgtccccgcggtcgcggcttctggcttctctgtggagcttggttcttccgtggtggtgcagcaccccaggaacttcaggaaccagtccttccttggagagctccccgggacagccacgggggccaagtgaaactagcgcgttttcttggatcctacactttatagtgagtcataaatactttaaatacaaagccaacaacatttgctgcaaataaacgtaaaaatactgttaaagtgtaaartgttttcctccgtaccatctgacgtttctggcggttcgttgaacgcgagagaacgctgagccgtctgcactgagcccgggagcatcttcagggcagcgccgcccacgcgcgaggtgaatgaaggacacggcctcttgacactcccaggcagcacagatagacggatccgtaagtggctcccgcgcatgttaaaatttgtatactgtaaggtatttcatggattgagtgaaatacctgacagggcctgtatccgttccctattgccacaataaccaaaaaccacaaactttgtagcttgaaacagcacaaatttatcatctgacagacaatgcatttattatctcacggttctgtagatcagaagtgctacctgggtgtcacccgggctgcactcctttctggtgactccacaggacaatccttagcttgcctttgccagcttctgtccacattccttggctttggtcccttcctccatcttcaaagccagtgatatgccatctctctgaaccttccatcctcaagtctaccgctgattgcagctggaaaagattctgagggctcacctgagtaatccaggatcatcttcccatttccaggtctctgcccttgatcacatcagcagaatccttttgccatgtaagctaatatattcacgaattccggaaattaggagataaacatctttgggggatcattattctgcctacagtagtgtcttaagaaaacaatatggctgtttgcaaatagatctcaattctatggcagatactaaaaactagtagtatgtgttcataaaatgcttcatttaaaatatgacttgtttgcttaccagcaggcaataactttaagcctaagtgaaacatctaactcagccatctatgtgtgagttgttggccagatcacttctccgtgttttattgtactcacctatcaccattacagtgaagctaataatagtaaactacctaaaaatggtaattgtaaaaaattagataattaagtaaaactcctaaaacagtagctggtcatagtaaggaatatatgtgttgttattactattattatcaatggaatgcatccacttgaaagttgcattctacatagccattatgtcagtttaatattttggctaataggccgggcgcggttggctcatgcctgtaatcccagcactctgggaggccaaggtgagcggatcatgaggtcaagagatcaagaccatcctggccaatatggtgaaaccccgtctctaataaaaatacaaaaattagctgggcgtagtggcacatgcctgtagtcccagctactcaggaggctgaggcaggagaatcgcttgaacccgggagrtctatagaggttgcagtgagccgagtttgcgccaccgcactctaatctggcgacacagcgaaaaacactactaattataattgtaattcttgattctgacatgcaccctgatattggaaatcttaaaatctagaaaaatctgctgcttgttattgatggattatatcycttttcacattgtctctaaaatcaaaatggcaaattgaaattttaatcaagcttctttttttcccctacaactaccagggaagaagtttgatttttttcccctctctgaaatgactagttgtgtaattttgtcttatttttccagaggtccattgagttaagatgtagctcttgacagagcagacctcttaatagaagtgataagcaaattcagaaataaattttgatttaaatgggaggtatcatctggttgaaggaatacccttgtgactaacaaaagaggaggatacctcattttcttttttttttttttttttttgagacggagtctcgctctgtcgcccaggctggagtgcagtggcgggatctcggctcactgcaagctccgcctcccgggttcacgccattctcctgcctcagcctcccaagtagctgggactacaggcgcccgccactacgcccggctaattttttgtatttttagtagagacggggtttcaccgttttagccgggatggtctcgatctcctgacctcgtgatccgcccgcctcggcctcccaaagtgctgggattacaggcgtgagccaccgcgcccggccctcattttctgagtgtttattatttaacctcactgctgtacttacagtgtatactgaagcagaaataatcatgacatgaaaatatgtcctagtgaactagttgcctcataaagttagacattctcaaatattccttcccccagtagcttttgtctttgcattgacatccttgtctaggtgctgatattgtgaacatctaacgctgtcagaccagtcacttcaaagttaaactgaatatcttgtaaaatattaaggaattcctgtagttaatatgtgtgatgttggataaatcacatgaatgaactgaatcacatacaaaacttttggcaaaggaggatctagcaaaaattaagccaattaaaactacaaaagagaaaaaaataacacagatggtgataacacaggcatttcaaaacaggctcatggaaggatgattaaacccaccaataatttgccaaaaaatagtctctctttatcttcacactgcaaaagtcaaatatatatctgtatgtggttgacagatctccagaattgtgagttaatctagcaaaaaggctccagaaaaaaatagatatgaaactctaagacaacacaagaaattaagtcttttgagttttagttagatgattttaggttgcagcatttctcccttcatacgtcgttccagccaataaggaagcaaagatgagtgaaggcaagagaaagaagataaaatagacctgtccttccttgccacaaataacctaaatcttaaagtttaaaactcaacgttgcacaacagtgtgaacatacttaacactattaaaccgtacacttaaaaatggttaagaaggtacattttatataatatgttctttcttatcacartttaaaaagcaaaacacaacaaaaaagctccggccaaagaaaggaaaatttgaggcttgaatgaggtatagtgaaagatatatagagtcagtgttagaagtatatcatggtcccatataatgaatatcattacaccttgaatattcaccaacaccatttttacttcatagactcaataaatagactcaaataatagaacatttaatacctcatgtcagataagtataaaaatcctgcaacaaaacaccaagaaatactggttgaaacatgtttataaaaactctcaaaatataaaagcgaatgcttatacactgttgatgggaatgtaaattagtacaacctctatggaaaacagtatggagatttctcaaagaactaaaagtagaattaccatttgatgcacgaatcccactactgagtacccaaaggaaaataaatcattatattgaaaagacacccacacttgtatgttaccacagtaaagttcacaataacaacgtcatggaatcgatctaagtgtctatcaagagatgactggataaagaaaatgtggtatataaacaccatggaatatattgcagccataaaaaaaaaaagaatamaatcaggtcttttgcagcaacatggatggagctggaggccattatcctaagtgaaatgactcagaaacagaaaatcaaataccacgtgttttcacttaaaagtgggcgctaactaatagatacatatggacatgcagaaggaaataatagacacagaggactccaaaagtgggtaggatgggagagaggtgagggttgaaaaattatctgttgggaacaactttcactctgagtgacaggtacactagaagtgcaaacctcaccattatgcaatatacccatgtaacaaacctgtactgtaccctctgaatctataaaattttaaaaataaaaaaatctcaatgcatagctgagctttcaagaagtacgtgaaatactcatagatcaaaaataaggaaggaactgaaaactagttattaagatggcacttataccactcctttcctggacacatttgtctggctcagttacaaaaaggtctgaattttcacaggcttgtgggagcagaagacatggtcttaagctcccacaagttcccacattgaaactgagcctcccatttgaaatcagaaagcttgaaaggtaacatccttagtgaaatggtgagctagaagaaaaaagtctggatagcagaaaagaaggaggatgaagagggatttgtctgccttggcatgggatttttgaaggggtattcttaattccctctgaaattttgaaaccacagctatgccctcaaatttaggatttgaatgtatacaatctgcgttacctaagaaactccaagccaagataatagcataatgtagtgcctggttaactgtatctaggttgctagaaagaagcatgcacatcctggcctggcccttgttccttgtttttgtctctttttccgaatcatccctaaagaagttggaagcagcttagaaagtaggagaggaaggtgaggcataaatcatataaaagaagcaatcacccccacattttcccctgccaaccacttgcctgtaccaagtgtgagctctgaaaggggaagtctttaaggttaaacaagtgttgaagtcttaattttttttattacatggactttaccaaactgactttttgtttgtctctttttagtggctagaagtgaccccaggatttttttattatcaagagagactagaagaatcatgagacttttcctagttgcctttcaagaatatgaagaaaaaaatggttctcaaagtgggtttgaatgagtattgttccaataaatgaacttatattcatatttcatcccctgagtcctggtgtttcaacatccattagaactgaataatcatactgcatatcaaagtttgtgggaaattgctaaagtgtaaaaaatgctcatattgaaaaagaagaaaagctgaaaattaattgtgcttccaactttaaaaaaggacaacaagctaatcctaaagaaactagaataaaaggaaaaaataaacagaagttaaagagtaattttaaaaaatacaatagaaattatcaacgaagccaaaagttgattctttgaaaagattaatgaagtaggcaaaccactggtgagatgaatcaagaaaaatagagaaaagactcaaataaacattaggaatggaaaatagggcaatgctaaagagaattcaaagatcagaaaaatatgggagtatactaaaaacgatttcatgcccaagtgttcaaatctatattgcctttaaaaatatataaaaaaggagccggacactggctcatgcctataatcccagcactttggaaggctgaggtgggtgaatcacaaggtcaagagatcaagaccatcctggctaacacagggaaaacccgtctctactaaaaatacaaaaaattagctgggcgtggtggcacacgcttatagtcccagctgctcaggaggctgaggcaggagaattgcttgaacccatgaggcagaggttgcagcgagcggagatggccccactggactccagccttggcgacagagagagactccatctcaaaaaaaaaaaaaaaaatcaaaaaggaaaagaagcactgaagaaatccataaccgttggagaagcttgaatcagtagttgataatgtccctccaagaaaagaccagatgtaagtgactgtacaggaaagttctgccaaatgtcaaagggaatagataaatatcacataaactcttccagagaatacaagaaaaggaacactccccaacttattttataaacttggttaaatcttgatagcaaaatttaataaggacaccatgacaagtgaaattataagcaaattttacttacagttatatgcaaaagttctaaacaaaatactggacaactgaatctaattttgaataatactagcaagaataataataataataataataataataataatgcatcatgaccaagttgggtttacctcaagaatgcaaatatagtttaaaactggaaaatctagtagtgaaatttaccacactaagaaataaagaagaaaaattatgtcatctcaacagatcgaaaaattttctaaaatccaaccaaatattagcaaaaaagcaataaaggaaaatttcttaacttaataaagagtatctattcgaaacctgcagcaagcatgatagttaatgatgaaatgttagacactgtctttttaaaaccataaacacaatgatatctgttatcactacttctactcatcattgatcttaaccatttcaataataaaagatactatatataaattatagatattgagaaggaagaccaaaactgctactattcacaaacaatattattattcacctaaaaagcaagagaatatgcaagtaaatctttagaataagagaattcaatatggtttgaggatacaagtgcaatttataaaaatcaactgtatttctatacactagctacacaagttagaaaatataatttttaaaatgtatttttacagtagcaaccaataatatgtaagaatagctaataattatctaaaaatgtgtgcaagttgcttatagaagcaataataaaaccatattgtaaacctacataaaggagagatataccatgttcatggtataaaaaaaatagatgtcaatttttccaaaattattcatagtgcaattccttgccagattactggcaggtttttttcccctggaccttgacaagaggattgtaaaatttatatgaaggcgtaaagtgccaagaatgatcaaagcaattttgataaaacataaaaaaggaacagaggaataaatggtgatggaacttcccacagaggagggaaatagggttgaacttcttatcctatacacaaagttaaattccaggtaaattaaaaacaaaatgtaaaatgcaaaacttttagaaaactttaaaattagaaaaaatgtaaaaaccaatccaacaagttatttttacacatccaaattttccagtcatcccagcacagttgtcaaatatcaaatgagtggcaaagtactagaatgatgaaagaagtggtataattataccactcataggactacttacaaagcagctgccttcctagacatgcttttattctaactctttaaatgaataggattgtattatattgtttacatgtcaaaatttgcatgtcaatgatgcatatatggttatgttcagagcattccttttggcattcttttgttttttaatgtaagattttaatttaatgacaaatgcaaaaaatataaacatgaaacatgagatttatgtcatatatgattaacttcttataaaaataatcagcataaaacactagcatgtccatataagaacatgctactcagctttgttagccttaaataaacaaaggtaggttgtttaaaatgtaaatgtaaatcaatagattaatattgctttaataaatacaacaaatgcagacttaattacaataaaatttaaaatgctaaaactaattattgaaagttaaattataaattgaataagatttcacataaaatattgacataatactcggacttaatccttatcattcttccctcatacatatccaaaaatgttgtagcatagagagctggctgatataagttccacagaaagactttttcccatctagaaaaatacaaaattgtatttttccaatgaataagctgcaaaaatcaattacatattcataatagaattgacctcctccaccccataaagattctaaagtaatatgaattacatttgaaggacatcaagataatccctcccaaaatgtagatttacaatattgtgtaaatcttcatggaaacattacatatttgaatcatggtgaaatcatagggtgaaaaattttttctattcttaccatggactccactagtggtcttcagattacatgacctataggctccatttcaactctaaaattctatatgatttctgctgaagataacttttatctcagttattttagaatgcatcacctcatctttggcaactttccttgaattgaattttgattgcttaaattcttcaagcaaggcagactttttcaaaagagaagctacatagacatggtttaaatattttaggttcaaattttaaaccatgtctatatactttgtaaagatgattgccaaagttttacttttcaaaagtgttcccaaagtaattgacagcttaggtaccatgaaacacgggtaaagagaattctatggccattacaagatatgcagacttgaatagtgattctgaatgcaaatataatcttatacttcatttataaggatcatttttatcacgttgccctaaattggaatgcaatggcatgatctgggaattgacagtgtttggttaaaaagaaattaacttgaggaattaattaagacagggaaacataaaaagcatgtaaaaggtaagtgagtttatttttaaactggatactattttttttaatataaagcaactctttcaggggaactgctctctccaatttatgcacagattatttgacagactggttgaaatatctcacaccacttttgcacattggaaatgcaaaacccaaagaattcatattttcaagactgttaacaccttctcaaatttctataattcattcaatttctgtagaaaaacatgagctttatttttcttactattaattatttatatagttcagtttcacagataggttctcaatatctaaaagcctgcaataatttcactgtcgaaaacattttcttaaagtttttatgcatttactagtgttgtcacaataaggccttgtatggctgtgaattgtccttgggcttttgatattcacaaccaggagaggatctcttttctttttctgtcatcctttttaatacttttctttcttttttttttttttttgagacggagtcttgctctgtctggagtgcaattgcacaggcgcgatctcgcctcactgcaagctctgccttccgggttcaagcgattctcctgcctcggcctcccgagtagctgggattacaggcacccaccaccacgcctggctaattttttgtatttttagtagagacggggtttcaccgtgttagccaggatggtctcgatctcctgaccttgtgatcccccccacctcagcctcccaaagtgctgggattacaggcatgagccaccgcgctggccgtattacttttcttaaagaaagactatgtcagttcctaagtctatggcaccttgaaaatttacatgcctgttaaaggtggacatttgtactgtatttttagatgatagttaagaaaaggagatgatgggggaagttcacacatggtcaaatatcattagaaaataataattccactaagcaaaataagcctaagaccataacaaagatgaattaaacgaagaaagtccacattctgtcttccacttttgtttgtgttttaacttagcattcattgataaaagaggatattcttgaaggaaaaaagttaaaattaccacttttttctgcttttaagtattttaattattgtggtatgtatcactagtctaaaggaataaagtataaatttcttgtcatctatattactccttcaaaaacatggtttttccaagttggtcacagtttagcagggaagaaagggttgtaaaccaagtatagtgtgatactatacagtgactcatactgtataaatacatactgatgcatttttgaccaagactagtatctttcagatttcagatatgagtgtataagccaatggtaatttgcatggttcttttcctaactatgtattttttaatatttcttataacctgtagaccacttactgaaactaactcagtttagtgttaaattctattagatgtctttttcttatttgtctgctgtaaaaaaatccctagttattgagacaaattgcaaaagaaataatatattttagaaaatcttagaaaagttgccagtcacctgggtgacgattcagttattcattcattcaacaaatatttgtttagtacatctgccatatactaagaacaccgctaggcactgaagataacagctatgaaacagaaaaacatagttcctaccctcataaaacccaaagtcatcaatgtctccaaaaattttggctaaaacgtggagagtacacaaattcttacatagttaaatagtacagctattattggaatcattttcatacttagacacattatatagtaaaatttaagaatatcaaaggcaaatttctaaaagttttcagaaagaaacatcccttacaaatgaacaggtaacatattcatattagacactttaaaaacttctacaaaaatgacaactgagttggccgggcatagtggctcatgcctgtaatcccagcactttgggaggatgaggcgggtggatcacgaagtcaggagttcgagaccagcctggccaacgtggtgaaaacccacctctactaaatatacaaaaattagctgggcatggtggcatgcacctgtaatctcagcactttgagaggccgaggtgggcagatcacaaagtcaggagttcgagaccagcctggccaacgtggtgaaagcccacctctactaaatatacaaaaattagccgggtgtggtggcgcatgcctgtaatctcagctactcgggaggctgaggcaggagaatcgcttgaccccaggaggcagaagttgcagtgagccgagtttgcaccactgcactccagcctgggtgacagagtgagactccatctcaaaaaacaaaacaaaacaaaacaaaaaactgagatatagttttttgttgttgttgttgttgttgttgttgtttttgagacagagtctcgctctgtcaccaggctagagtgcagtggtgcaatcggctcactgcaacctctgcctcccagtgtcaagcgattctcctgcctcagcctcccaagtagctgggactacaggtgtgcaccaccatgcccggctaatttttgtatttttagtagagatggggttacaccatgttggccaggatggtctcaatcccttgacctcgtgatccacctgccttggcctcccaaaatgctgggattacaggcgttagctaccatgcccggcctgagttatacttttttagtattggagaaaaaaatctttgaagctagaatcttgcactcatccggattggcatttaaatatgaaaagtgcaatagaaataatctcagccgtataaaacct

SEQ ID NO: 97082 - DNA, 38940 bp, Homo sapiens
  misc_feature (1)...(38940): n = A,T,C or G
nnnnnnnnnnnnnnnnnnnnnnnnnnnnnnnnnnnnnnnnnnnnnnnnnnnnnnnnnnnnnnnnnnnnnnnnnnnnnnnnnnnnnnnnnnnnnnnnnnnnnnnnnnnnnnnnnnnnnnnnnnnnnnnnnnnnnnnnnnnnnnnnnnnnnnnnnnnnnnnnnnnnnnnnnnnnnnnnnnnnnnnnnnnnnnnnnnnnnnnnnnnnnnnnnnnnnnnnnnnnnnnnnnnnnnnnnnnnnnnnnnnnnnnnnnnnnnnnnnnnnnnnnnnnnnnnnnnnnnnnnnnnnnnnnnnnnnnnnnnnnnnnnnnnnnnnnnnnnnnnnnnnnnnnnnnnnnnnnnnnnnnnnnnnnnnnnnnnnnnnnnnnnnnnnnnnnnnnnnnnnnnnnnnnnnnnnnnnnnnnnnnnnnnnnnnnnnnnnnnnnnnnnnnnnnnnnnnnnnnnnnnnnnnnnnnnnnnnnnnnnnnnnnnnnnnnnnnnnnnnnnnnnnnnnnnnnnnnnnnnnnnnnnnnnnnnnnnnnnnnnnnnnnnnnnnnnnnnnnnnnnnnnnnnnnnnnnnnnnnnnnnnnnnnnnnnnnnnnnnnnnnnnnnnnnnnnnnnnnnnnnnnnnnnnnnnnnnnnnnnnnnnnnnnnnnnnnnnnnnnnnnnnnnnnnnnnnnnnnnnnnnnnnnnnnnnnnnnnnnnnnnnnnnnnnnnnnnnnnnnnnnnnnnnnnnnnnnnnnnnnnnnnnnnnnnnnnnnnnnnnnnnnnnnnnnnnnnnnnnnnnnnnnnnnnnnnnnnnnnnnnnnnnnnnnnnnnnnnnnnnnnnnnnnnnnnnnnnnnnnnnnnnnnnnnnnnnnnnnnnnnnnnnnnnnnnnnnnnnnnnnnnnnnnnnnnnnnnnnnnnnnnnnnnnnnnnnnnnnnnnnnnnnnnnnnnnnnnnnnnnnnnnnnnnnnnnnnnnnnnnnnnnnnnnnnnnnnnnnnnnnnnnnnnnnnnnnnnnnnnnnnnnnnnnnnnnnnnnnnnnnnnnnnnnnnnnnnnnnnnnnnnnnnnnnnnnnnnnnnnnnnnnnnnnnnnnnnnnnnnnnnnnnnnnnnnnnnnnnnnnnnnnnnnnnnnnnnnnnnnnnnnnnnnnnnnnnnnnnnnnnnnnnnnnnnnnnnnnnnnnnnnnnnnnnnnnnnnnnnnnnnnnnnnnnnnnnnnnnnnnnnnnnnnnnnnnnnnnnnnnnnnnnnnnnnnnnnnnnnnnnnnnnnnnnnnnnnnnnnnnnnnnnnnnnnnnnnnnnnnnnnnnnnnnnnnnnnnnnnnnnnnnnnnnnnnnnnnnnnnnnnnnnnnnnnnnnnnnnnnnnnnnnnnnnnnnnnnnnnnnnnnnnnnnnnnnnnnnnnnnnnnnnnnnnnnnnnnnnnnnnnnnnnnnnnnnnnnnnnnnnnnnnnnnnnnnnnnnnnnnnnnnnnnnnnnnnnnnnnnnnnnnnnnnnnnnnnnnnnnnnnnnnnnnnnnnnnnnnnnnnnnnnnnnnnnnnnnnnnnnnnnnnnnnnnnnnnnnnnnnnnnnnnnnnnnnnnnnnnnnnnnnnnnnnnnnnnnnnnnnnnnnnnnnnnnnnnnnnnnnnnnnnnnnnnnnnnnnnnnnnnnnnnnnnnnnnnnnnnnnnnnnnnnnnnnnnnnnnnnnnnnnnnnnnnnnnnnnnnnnnnnnnnnnnnnnnnnnnnnnnnnnnnnnnnnnnnnnnnnnnnnnnnnnnnnnnnnnnnnnnnnnnnnnnnnnnnnnnnnnnnnnnnnnnnnnnnnnnnnnnnnnnnnnnnnnnnnnnnnnnnnnnnnnnnnnnnnnnnnnnnnnnnnnnnnnnnnnnnnnnnnnnnnnnnnnnnnnnnnnnnnnnnnnnnnnnnnnnnnnnnnnnnnnnnnnnnnnnnnnnnnnnnnnnnnnnnnnnnnnnnnnnnnnnnnnnnnnnnnnnnnnnnnnnnnnnnnnnnnnnnnnnnnnnnnnnnnnnnnnnnnnnnnnnnnnnnnnnnnnnnnnnnnnnnnnnnnnnnnnnnnnnnnnnnnnnnnnnnnnnnnnnnnnnnnnnnnnnnnnnnnnnnnnnnnnnnnnnnnnnnnnnnnnnnnnnnnnnnnnnnnnnnnnnnnnnnnnnnnnnnnnnnnnnnnnnnnnnnnnnnnnnnnnnnnnnnnnnnnnnnnnnnnnnnnnnnnnnnnnnnnnnnnnnnnnnnnnnnnnnnnnnnnnnnnnnnnnnnnnnnnnnnnnnnnnnnnnnnnnnnnnnnnnnnnnnnnnnnnnnnnnnnnnnnnnnnnnnnnnnnnnnnnnnnnnnnnnnnnnnnnnnnnnnnnnnnnnnnnnnnnnnnnnnnnnnnnnnnnnnnnnnnnnnnnnnnnnnnnnnnnnnnnnnnnnnnnnnnnnnnnnnnnnnnnnnnnnnnnnnnnnnnnnnnnnnnnnnnnnnnnnnnnnnnnnnnnnnnnnnnnnnnnnnnnnnnnnnnnnnnnnnnnnnnnnnnnnnnnnnnnnnnnnnnnnnnnnnnnnnnnnnnnnnnnnnnnnnnnnnnnnnnnnnnnnnnnnnnnnnnnnnnnnnnnnnnnnnnnnnnnnnnnnnnnnnnnnnnnnnnnnnnnnnnnnnnnnnnnnnnnnnnnnnnnnnnnnnnnnnnnnnnnnnnnnnnnnnnnnnnnnnnnnnnnnnnnnnnnnnnnnnnnnnnnnnnnnnnnnnnnnnnnnnnnnnnnnnnnnnnnnnnnnnnnnnnnnnnnnnnnnnnnnnnnnnnnnnnnnnnnnnnnnnnnnnnnnnnnnnnnnnnnnnnnnnnnnnnnnnnnnnnnnnnnnnnnnnnnnnnnnnnnnnnnnnnnnnnnnnnnnnnnnnnnnnnnnnnnnnnnnnnnnnnnnnnnnnnnnnnnnnnnnnnnnnnnnnnnnnnnnnnnnnnnnnnnnnnnnnnnnnnnnnnnnnnnnnnnnnnnnnnnnnnnnnnnnnnnnnnnnnnnnnnnnnnnnnnnnnnnnnnnnnnnnnnnnnnnnnnnnnnnnnnnnnnnnnnnnnnnnnnnnnnnnnnnnnnnnnnnnnnnnnnnnnnnnnnnnnnnnnnnnnnnnnnnnnnnnnnnnnnnnnnnnnnnnnnnnnnnnnnnnnnnnnnnnnnnnnnnnnnnnnnnnnnnnnnnnnnnnnnnnnnnnnnnnnnnnnnnnnnnnnnnnnnnnnnnnnnnnnnnnnnnnnnnnnnnnnnnnnnnnnnnnnnnnnnnnnnnnnnnnnnnnnnnnnnnnnnnnnnnnnnnnnnnnnnnnnnnnnnnnnnnnnnnnnnnnnnnnnnnnnnnnnnnnnnnnnnnnnnnnnnnnnnnnnnnnnnnnnnnnnnnnnnnnnnnnnnnnnnnnnnnnnnnnnnnnnnnnnnnnnnnnnnnnnnnnnnnnnnnnnnnnnnnnnnnnnnnnnnnnnnnnnnnnnnnnnnnnnnnnnnnnnnnnnnnnnnnnnnnnnnnnnnnnnnnnnnnnnnnnnnnnnnnnnnnnnnnnnnnnnnnnnnnnnnnnnnnnnnnnnnnnnnnnnnnnnnnnnnnnnnnnnnnnnnnnnnnnnnnnnnnnnnnnnnnnnnnnnnnnnnnnnnnnnnnnnnnnnnnnnnnnnnnnnnnnnnnnnnnnnnnnnnnnnnnnnnnnnnnnnnnnnnnnnnnnnnnnnnnnnnnnnnnnnnnnnnnnnnnnnnnnnnnnnnnnnnnnnnnnnnnnnnnnnnnnnnnnnnnnnnnnnnnnnnnnnnnnnnnnnnnnnnnnnnnnnnnnnnnnnnnnnnnnnnnnnnnnnnnnnnnnnnnnnnnnnnnnnnnnnnnnnnnnnnnnnnnnnnnnnnnnnnnnnnnnnnnnnnnnnnnnnnnnnnnnnnnnnnnnnnnnnnnnnnnnnnnnnnnnnnnnnnnnnnnnnnnnnnnnnnnnnnnnnnnnnnnnnnnnnnnnnnnnnnnnnnnnnnnnnnnnnnnnnnnnnnnnnnnnnnnnnnnnnnnnnnnnnnnnnnnnnnnnnnnnnnnnnnnnnnnnnnnnnnnnnnnnnnnnnnnnnnnnnnnnnnnnnnnnnnnnnnnnnnnnnnnnnnnnnnnnnnnnnnnnnnnnnnnnnnnnnnnnnnnnnnnnnnnnnnnnnnnnnnnnnnnnnnnnnnnnnnnnnnnnnnnnnnnnnnnnnnnnnnnnnnnnnnnnnnnnnnnnnnnnnnnnnnnnnnnnnnnnnnnnnnnnnnnnnnnnnnnnnnnnnnnnnnnnnnnnnnnnnnnnnnnnnnnnnnnnnnnnnnnnnnnnnnnnnnnnnnnnnnnnnnnnnnnnnnnnnnnnnnnnnnnnnnnnnnnnnnnnnnnnnnnnnnnnnnnnnnnnnnnnnnnnnnnnnnnnnnnnnnnnnnnnnnnnnnnnnnnnnnnnnnnnnnnnnnnnnnnnnnnnnnnnnnnnnnnnnnnnnnnnnnnnnnnnnnnnnnnnnnnnnnnnnnnnnnnnnnnnnnnnnnnnnnnnnnnnnnnnnnnnnnnnnnnnnnnnnnnnnnnnnnnnnnnnnnnnnnnnnnnnnnnnnnnnnnnnnnnnnnnnnnnnnnnnnnnnnnnnnnnnnnnnnnnnnnnnnnnnnnnnnnnnnnnnnnnnnnnnnnnnnnnnnnnnnnnnnnnnnnnnnnnnnnnnnnnnnnnnnnnnnnnnnnnnnnnnnnnnnnnnnnnnnnnnnnnnnnnnnnnnnnnnnnnnnnnnnnnnnnnnnnnnnnnnnnnnnnnnnnnnnnnnnnnnnnnnnnnnnnnnnnnnnnnnnnnnnnnnnnnnnnnnnnnnnnnnnnnnnnnnnnnnnnnnnnnnnnnnnnnnnnnnnnnnnnnnnnnnnnnnnnnnnnnnnnnnnnnnnnnnnnnnnnnnnnnnactcgggcagctcttcgccgccgccgtactcctcgtagcgcgcccggggctggtaggggtagatgacccccgccgaggccacggccgccgcccccgcgcccacgccgccgcccgcgggccggtagtacacgaaaccctggtcgtaggtccgcgacgcggggtcgtagttctcgtactggctgacgaagggcgcctgcgggtaggggaactgctgcgggtaggagggctgctggcggtaggtgctggcgaaggccgaagccgcgaccgaggaggcggagcccccgtgccgttgctgggagacggaggtgcgggcccgggccatgcccgtgctgtccccgacggccacctcgcgccagttgtcgggcacctggccaaagccgaatgggtgccgcgcctggccgcgcacggtgtccgagcccacgcgccccggcaggggcagggacggcgcctgccgacgccgggggctcccgtggctgcgccgctgctgggcctggggcgcgccggccagcagcacccgggagctactctcggagcgctgaggtccggccggcacgtactctgagcccgagttgagcaagctgtacacctgcccgttgttctcccactggatcagctgccgccagcgggcggggtccgagccctgcccgggctgcgcctgctgcccgtgcaccagcacgcacaggcaggcgccccacaccagggcccccagctgccggctgcctcgggccagagccatggtgacccctctgcagaggcctggtggacagagaggctctcaggagtggccccctgggcgtgcttctcttcccacggcctcgaggacaggaaggctccttgcttgccccagctctagctttgtccatgctggccttgtcccgagcgggacggctcctccgatgacagcatttcaaggccaaggggtcagggcagggcaggggcggtgcccagggctgcacgaggctctccgcagggcaccgggcgggcaggaccgcctgtgggccttacatggccagccccgcactggctggccgctcggctggcgctttcccactctgaatgaataagcaacaggctgggagcgtcgggaggcttcggcctcctggtccgcctgctggggcctcctccgcggggccctatggcccgccggcttttagctatgcgccggtcccacagctgcagtgctccctcagtccctggagttcccagccaagccacagacctgcctctgaggaagggaatcgagcagggagtaggaggggacctctggggactcgggcctggtaagtggggctctggcaggcagaacggggctggggtgtcagcaccaccccgcccattcctctctgctttggtcacagcatccctggtctccaccttgctcactggcttctcgtktgggctggaatgggcctctgactcctgtctgccccagcctccttcccgtactcccgggttctcccttttccttgttccctaaagccagtgctaattaagacacaccctctttgcatgttccttccaccattatcccacaccctcaataggaagaaaaaaaaaaaaaagacacaccctctttgttggtgggcctcctcggggagatgctgaacagggaccactctctaattccaggtcccaggtgcaccgcagctcttgggcctgcgaagagaggcactggagctgcagcttttccctcgtggcacacctcaggggcttactttcccagtctgaagagtggggtgtatccctgagctgaaaagcacttgtgagatcctgggagagatcaacttcccagacatcacgtatggtttctgtcctacatctcttggctctgcatagcctgggaataacttgagtgtacacatggataaaatgaaactgggggctgtctttgatatgggacaggggtcactgtgaggcagagaagccagtaagcattgaacaacagaagggggttccggagacctggcctggtcctgttgctgtgtggcttagtcccttactctatctgatccaggtgccacagcttaccaatggaagattaggccagatggctcctgagagtgctttgggagattctctgttccttctgggaatggcagggataggagggggtcccagaagtttgaacgctttggcatccaagaaatcacactccaaatactgctcttctggcctcccctgggctgccttctccaaccgtgttcctgggaaccgaagggcagaaattgccctcttgggcttataaacaaggtatgaaggacctgtccttaatttggctcctgtatattctttattttggaaatgcctggagcccacctagagaggaggcaactagagtggacaytctttgggaactatagacctcccaaccccatccttgccaggcagcatttgttcacccattgcactgttcttcaggactgaggcttggactccagcatgtctctaccctttaaatgcccagaatccagcccagaggtagggggcttccaatacctcctggccagcaacttgtcaacgctgacacctcagctccccagcatggggtttccatctcagactccagacaagattcctccaaagagccactggtgtgactgacaccaagcaagatgctgaggcagggcttactgagggccgggacctggagggttaagccttccctccctcctgcttgccccctgcagtgttggcctcagctgcttggaatccctggggtcctgtagggccctcccgccagccagatgggcagctgctgcagcagaggagggggagaaatggaaacaggcctcagggtacccctaggcagggagggaagggaagaggagtggagggaggacagaggatggctgtgaggaagggaactcagttgccctaacgtgaaggcaggacccctcgccttgactcggacagcagggcaggggctgcctcaaggctttggatgtggggggatcagggcacatgccattccactcagcgggcctcagagccagctcttggcgtgaaaccttacccgatgctggctcctgctcctctctctttttttcttaataaggtcgaatcagagtgagtcagaggagccaagtttcctgttaggctctatttgaataaactctgctctgaacatagcctgggcctctgcacagactcccctggccaggactgcgctcctgccagccatccctgctgagatggagacctgggggtccacaccatgacttgagctagggacctggcctggcccagccactccccagggaagctttttaagctctcagagcttcagagtcccgtctgtgacctgggggtaatcatacctttcttgtggcatatttgagaggatggaatgagaggattatgaaaagtccccagcacagagccagacatgtggccactattttccttctttcctcttgacttgtgagagaagggagggrtttatctcttggggttgacccccactcccacttcctctgtctttcctgtttttatctgtcttcagcatctttccttgctcagggtgaaccttgtgcaggggggccagaggtggcccctccaccagagctgtcctctcccttcctctctactccctccttctgacctcattctacttgggtttaggtctcctgcagtggctgacaggcccagcagttctgtgagcccaggggagcctgccttccatcacctctcctcatgctgggcaaggccttgccttggtggctggaggtgtcctggcatccttaggttgaaacctgcagggtggggtcctaaaagagacctgggcaggttatggagggtgcagagctggggtcaaatgagggcgtggactcgaaggctgagctgagccagagctgtctggggtgaagggcagcttctctctccgcctgtccctgcaggctgggattcacacccacatttttaagacccaggcatgtgcttgaagcttgttgccagttcctggcactaggaaccggtgtcaagggaccctcggaggggtggtgatagaaggatgaaagagcctgttgattgcgcatgactttattaagcccctgccacgtgctcagctctgtgttgccggggctcccacggagcagccagggtcctgtgaccctgtcatggaaggctgagttctggaaagtccatgggggaaccaggaagcagcaggcctgaccagcagcgggtctggggagcagagaggggtcaggagctgtgggattcctcccttgctttgcagagggacgtactaggaggcccatggtgggtcggaattttctgtgatagtggggatgccaagagggaaggccccagarcacccaaaccctccatcttccaggctgcgctgtagatgggtttggggcagcactgggaatccaagacccaacccaggcagctgctgcctctggaaagcgggctggaggaagtgctgagtgaggaggctgggcgagctggcacagaaagtgctgactctgcagggagaggaccaccgagtgaccactgccagctgggccccgtgcctacccctcccctgcagccacatctggcgcaacggtggggtgggggacccagtccccagggccgaggtagccgaggagggggcctgaggagggggccagagccatgggtttggaagtgtttcttcagggctggaactccactccggaagtgggggaggtgaggtcagagccttttcgagggactaatggggttgggggtggaaggaacccacccttctctaggacccaggagaattctgtggctctggctacttcccagtcggttttcctcccagctctctgggtcccctcccctacggctcccaggggatttggaaataaccaagctgatacagtactctgggcattcaggttgggctctgtggaggcgggaagccgcctcagccccttagagcttctcccctctctgactttcacccctccccagagtctggggcaagcaggctcctgtctctacctccacctccagccccaacccctatccaacccgggggccctgagcccagagccagtggagacaggagccgattgtcattgcaggaatgaggaccagctggggagagagatacttctcccagggacctgccttggcggggggattctgcatagttgtctggggccttctgggtgggagggccctgagctggcatgctgtgggggtaagaggaaactgtcccctgcccgagggagagaactgacaaaaccaagcagggcgccaggcccttgggacacagtccagcagagacctgcaaatctaggagggaaactaaggcaggaacccctggttctctctgctaacatcctgacaagttaagggagggcttgtgctctctctctccttttctttttgtctgtaaatttaactttcactgggatctctctgggtttctctagctttttctttgtttgtttttgttttttttwaaaaagcatagtcttgctatgttccccaggctggagtgcagtggattcacagcagccttgaactcctgggctcaagccatcctcctgcctcagcctctgggactacaggtgcacatgaccacgaccggctttctatagcttttaaattttctgcagtaacctccctccaccttattcgttcattttctatctgtggccaagtctgtgacttgcagcctccatctgtctccatctgtttctgttcttcctcaactctctttcacactccctcctgtcatctctatctgctgatgcttctaccaatgaacgattccttcattcatccactcactcactcactchgcatgttccctgggtatctgtggaataccaggccctgtgctgactgcagtcatcacagagagcagccagacctgccaagtttccagtgggtgcccaggctggtgggggtgtataagtgatagtcctgggtggaggtgaagacgtggcactgactctctgtgacctttgggaggcatttctatttcagtctccatgtctgtctgtctgtcygcccatttacccatccatctctgtctgtcagcgactcagtccttggttcaccttcatgaggtggctttttttctgctttctcagagctcatgcagtttactcatttccccctggtgggggttggtagtggagctggagaaggggaggtggtgtggggtgagactggatgtggtgatggaagtgacagaggtattccaaccagaggggctccatcttgaatggggactgggtaaaatgagcctgagacttactgggctgcattcccaggaggctaggccttggtagtcacaggatgagacaggaggcccaagatacaggtcacaagcactccactgataaaacagaatgcaattaaaaaaaaaaaaagccagatggctgggcatggtggctcatacctataatcccagcaaaaaaaaggccgagacgggcagatcaccagagctcaggagttcaagaccagcctggccatggtaaaaccctgtctctactagaaatacaaaaaattagccannnnnnnnnnnnnnnnnnnnnnnnnnnnnnnnnnnnnnnnnnnnnnnnnnnnnnnnnnttgaacccaggaggcagaggttgcagtgagccgagatcacgtcattgtactccagcctgggcaacaagagtgaaactcttgtctcaaaaaaaaaaaaaaaaaaaaaaaaagccagcccaaaccaagatggtgatgatcatgacctctggttgtcctcactccccattgtacactatcatatcacattagcatgctaaaagacactcccaccagtgcatgacagtttacaaatgctgtggcaacatccggaagttaccctatgtgagctaaaaggaaggggaactctcagttctgggaactccctacctcttgcccagaaaactcatgaataatccatcccttctttaatatacaatcaaaagataatcatagatgacagctaaccagcagccattggggctgttctgcttatggagtcgccattcatttattccttcactttcttaataaacttgctttcactttactctgtggacttgccccatattctttcttgtgtgagatctaagaagcctctcttggggcctggatcgggaaccctttcctgtaacagaaggagcaggcccttggggccagtggagactagttttgcccagctgggttctggaaaggaaagggccacagggtgatgaaagatgagatatcagcaatctctcccttaagtttttttgtaatacaatttttaatctcagattacaaaagaaataggtcaattataggaaatttagaatacagagtaaaaaagaaaaagtaattcattctgtaacctagagaaaaaccattgttttaggctccacccccccactcatttaaaaaaacaattaggatcatagtgcctatgtcattttacaagctgctttgtttgtgtaataacagttgatgaacatttccttgtctcaaggtaactgccgtttcaatattcatattgatcacaggagctcctgcctgcctggatgaagaggaggtcaagactttgtcccccactccgcaagataccctctctgttccggagcggtgrgtccctcccctgttaggaccttgtctccctcaggactggacctggatcctgggcctgcagtcagattgccagtttcacttagaggtggaaatgtcaacccactggttggaatgggaaggtagggtgtggggtcggggagtaccttcatttctatctgcccaggaggccagccgcttcctgcatagcatttccttcctgcagtatgggaaggaccaggctttctcagaccacagaatcttgagagccatttccacgtggagcaagtggtggctaccagccttgggtctacataactagggcctcatccctggcccaagaatcctgctccacagccttcttgtgtccctgtaggaggagaaacacctggcaacttaaattttttaaaataacttttttttttttttgagacggagtctcgctctgtctcccaggctggagtgcagtggtgcgatctcggctcactgcaagctccgcctcccaggttcatgccattctcctgcctcagcctcccaagtagctgggactacaggcacctgccatcacgcacggctaatttttttgtatttttttaggtgagacrggatttcaccatgttagccaggatggtcttgatctcctgacctcatgatctgcccacctcggcctcccaaagtgctgggcttacaggcgtgagccaccgtgcccggccaaaaataacttttaaaaacatgagtatagcatacacacacacaaaagtccacaaatcctargtgtaccacttgatgaatgatcccaacgtgagcacacctctggattaccacctggatcaagaaataggacatcacagcagctggcagcttccaaggagaagctctggaaagttctgcctgtctcagcacctggctggatcggaaacgagttttctttaaccagatttttaatgactgacttatgtggacaaatcataactgaatgaatcacctcctttgttgatttttttgggtactttatttgctattataaatgatgctgtaataagcacccttgaagaaatcttcatatctgcctctcctgtgtagcaggtcacagtgcctgggtttggttctagccctcatttgtgaactgtgtgactcaccatgccttttttctttctgtaagacaggaataatggtaagaatttaaatgggggtaatatggagcgcgtttagttcagagcctggtgcatacaagcactcaataagtactggcgattattagacctttagattaatttattagaagttggatttctggtgaaagggtttgagtgtttttgaggctttggcacagaatacccagctggtcccagaaaggtggttcccatttacctgcccgaaggtaattcacccttactgatactgagtactgttttctaaaagaacattaaaaattggataggttaaaaacaggtgaatacatttttttagttgcatttttttggttacccgtgagagtgaacatgttgccatgtgtttgctgacctcctaaatggtctatttgctcctacctttgtaccccaaaagtctgctctcaagatggtagccagaatgatcctttttgagacataagtcaaaatttcactcttctccttaaagctctgcaatggttctcaggttaaaagccaaagtcctgttcaaggcctccagggtcctcaccacttggtcccttgctctttctgttctagccaacttggccttctcctgcccctccgccgcaccatggcaatttcccctgctctgtgtggtcaactacctgaatctgttcaaagctttgctcaaatgtctccttcctgatgagacctccccagcccctgagctccccatgcctcactcctgatcgccttacttaacycttctttttcttttttgccagtagtacttatcaccgtctaaaatacttcataatttacttgtttattgtttgcccctctccaatagaatgtaagctccttggggcagggacctttgtcctttgtcttgttcactgctgtgtcccatgtgtaaacttgtctggcacagaagaggtgctcgataaatatttgttgagtgaatgaatggtaaattttctgttcatattctttgactattttctattgtaatgttcatctttttagtattggtttataagatgtatatttagcaccttttcatatatcactctttgtcacatattatgcaactaatttgtcatttccatcaatttttaaaatactttcttgatgcttcatttttaagctgtcagattattaatcttttctttatggtcttggactttattgttgcataaccgctgccttcaccaggaacatataaattttcaattaaatgttcttctgagattttatgatttcactttttatattaaactcttcattttgtcttcatgtgtggtgagaggtaagaacataactttaaagcaaattaaccaactatccccaaatgaattataaataaattaatcattttccaatgatctgaaaggccattttatcatacactaaatatttttgtgtgtttgactgggtttaccgttctgttccgttggcctatcacatcgttcttacattggtatttgttgccctattttaatgattgtaactttttaataagggttaatgactgagaatacaagtcccattgttttgttttattatttttattatttttttgagacagggtttcactctgtcacccaggctggagtatagtagcactatctcggctcattgcaacctctgcctccctggttcaagtgattctcccacctcaacctcccgagtagctgggactacagatgcatgccaccacacccagctaattcttgtatttttagtagagacagggtttcaccatgttgaccaggctggtcttgaactcctggcttcaagtgattcacctgcctcgacctcccaaagtgctgggattacaggcgtgactcaccacgcctggcccatttttttcttttgaggtgttctttgtggcaattcatatattctttaagataaattctaaactttttttttctgccgagataaactagcagacaaatcccactggacattgcaattggattagttttgtagattaatttagtgataatcaacttctttgcaccattgagtgcttctgtccgggaacgtggcatatctttctattattaaggtcttttttattataggtctttagggaagctttattttatagatgaatgtagtgtgtttggtgcttattttcataaaataaagcaatgacatctgggcaggcagcttctgaaatggctcccaatgatccttaccttctgatagtcacccccttggagaatccctttcctttgtgtgtgggctggatctagtgacttgcttctcataaatagaatatggcaaaaaatgatgggttgttacttctgagattaggttataagaggcgaatttctgttttgctgtaattttgtctctctaaccctcttgctttcctgtgctcatgaaaccagctgctgtgttgtgagccaccttatggaaaacccatgtggcagagaaccgagggtggtggctggccaacagcaagccaggagctgaggcccacagtccaacaactggtgaggaaccacatgctgccagcagccatgtgagggaacttagaagcaaatccttccccagttgagccttcagatgacaccagagccttggctgaccccttacttttacccttgtaagagactttgagccagaagacttggctaaaccacacctggattcctgacccacagaaacttgaaataataaatgtgttgttttaagtcactcggttttggggtaatttgttacatagcagagataactaatatagccccccttttttgcatcatgttttctaacagtttattaggaaatgaaaatttattttaggctgggtgcagtggctcacacctgtaatcccagcactttggaaggccgwggtgggtggattgcctgagctcaggagttcaagaacagcctgggcaatgtggcaaaaccctgtctctactaagaatacaaaaattagctgggcatgatggcgtgagcaccagtagtcctagctacttgggaggctgaggtggaaggatcgcttgagcccaggaggcagagattatagtgagccaagatcacccccattgcactccagcctgggtgacagagcaagaccttgtctcaaaaaaaagaaaagaaaaraaaaagttattttataactagccactttactaaattcttctattttgataattttgtattttctcagttttttatgggaagacaatcatatttgcaaataattataatttgtttccctcttttttattttttctatctaatttcattagctaggatctttagaataatgttaaataacaagatattagaactctttgtcttgttctcagatttggtggaatgctacttgtattttacgcttttggttttggctgttggtttgagatttattattttttatcatgtgagataagtgtactttgatttcccgtttacttgagcttttaaaaagaaaatcaggaatggatgtcgcaatttaccaaacatctattcagtatgtaaaatgatctttttctcctttgacctattgctgtggtaaatcagttcactgccattctaatatagaattatccatgcattccaggaatgtttgctcatggtgtattcttttaatacattgttgacatacattggacttatctgattaaattttcattaggactctacatttgtataaatgaggcaggtgtatgactcattcattctgtctttctttgtgccacttgtcaggttttagtatcagggttattctggctttacaaaaagaattgagaagcgtttgagttaaggtcctggcaaaaaaacactcacccaagatggtttaactaaagagactttaatgaagggacttcttatagaaatgtggataaggggactgggtgcggtggctcacgcctgtaattccagcactttgggaggccgaggtgggtggaaaacttgaggtcaggagttcgagaccatcctggccaacatggagaaaccctgtctctactaaaaatacaaaaattagccaggtgtggtggcacatgcctgtagtcccagctactcgggaggctgaggcaggaaaatcacttgaacccaagaggcagaggttgcagtgagccaagattgtgccgctgcactccagcctgggtgacagagtgagactctgtctcaaaaaaaaggaaatgtggataaggttaagtgaacaaaaaaggcatggtaaggatggtgaggtacccagagactagacattatggtgttactgtccttagggcttcagggacaatgggaggaaccagtgtgaccagagcccagggagagctggaaccttggagaagaggtgcaggcaagagctgagcttgtggaggaacaaagtccccgccagagagagggcacgaaaagaggcagggcacagatgagatacaccagctcttctcacctcctgccttccacactcctgcccataccctccattgtcagactcagcaaggagctggaggacaagggagcctgggtgatgaatgcagtttgtggggctcagggctgggcagggaaggaagtggctctggtgtgatttctgcttcctgactgatacgtgcataaccatgtgtttaacatgtttttaatattcacttccagagcttttatacaatttctctgtgttgattttttttttttttttttgagacagggtcttactctgttgcccaggctggagtgcaggtcaaggtcactgcagccttgacctccctggctcaatcaatctgcccacctcctgagtagctgggactacaggcttatgccaccatgcctggctaatgttttattttttattttttgtagagatgggattttgccatgttgcccagcctggattttttttttttaatttagagactttatatgggccaaagttgagaattgcagcccaggacttgctttttcacttactattattttacttactttgactcttgctggcttggaaagagtgcatctctgagtacctttttccccgtgaaaagtagagccatacatggcatgtgtcctaagttctggcatgtgggaaagtctttttctgttgtcttcatgcatgattgcaccaggcaaattgttaaaatgtaaggtcacaactgatctctcaaaattctgtaaaagagtggttcccaaagtgtgttctattgaacaccagtcttaccacatagtctatggcaaaggatttcatagtcaaataagtttggaaaactgggcttgctaatattgccagtttaataacatgcatgaatacgttaaaagccctgagaaagcctcagcatagggttttatcttgttttgtttaattcagcatttcccaagcttattttatgacagaaacttttttcctcagtacaaatagttaacaaaattccatggactctctcttccaattatacactttaagaaatgttgggctgggtgtcgtggctcacacctgtaaccccagtacttcgggagaccaaggtgtgaagatcacctgagcccaggatttcaagaccagcctaggcaacatggtgagacccccatatctacaaaaatcaaaaaaattacctgggcatagtgatacatggctgtagtcccaagctacttgggaggctgaggcaggaggatcacttgagcccaggaggttgaggctgcagtgagctgtgatcgcaccactgcactccagcctgggccacaaagtgagacccggtctcagcaacaacaacaacaaaaataaatgttgcagatatttctccatatttctctctgcatgggtgctgatagaattctttctttacccttgcaatttgaaaattctacatggcatttctaagtgttcatttatttttattaatttgacttaaggaggaatcttttaaatgtataagcccaggcttctcatcagctcagggacatctttctcctgtgattcttgcttttatttcatttgtttagtgtcttctgtaagcccggatacctatcatgttgtctctctgttttttawcctgttgtgcttttcctctgcagtctcagagaacttctcctatctgtccttcacatttacagattccattttctgtagttccaattctgttctttaccatcttgatggaaattaaaattctactgcatttttagtttctttgcagtctttccttctctcctctggtttgtttttgatttccacctgcctctcagtcagcagccttctcatttcattctttccatcttatttttcaactctcatttcttagagtgcgcactttaattaaatgaattgmgtacagaacagatgtggtctgcaagttatttatgtttatgtgataaatcttttcaaaggaattacttttctctgcccttttagggccacattctcttccttgcctcatgcagagtcttttcaaaggctctgtgtatttccaagtatatgtgtgtgcatgtgggtttgtgtgtgggggtgtgtgtttgcttttctctgtactcytactttaaagatgagtgttttaaactttttttaattttatttttttttaatttatttatttagagactgggtcccaccatattgcctgggctggcctcggactcttgaccccaagtgatcctctggcctcagcctcccaagcagctggacttacaggcaggcaccaccgcaccgagctaaaagtgagtgttttataaaatcttactattttcccccaaacaaggagaaggaaatggattctctttaggtcacccttcgtctggatgttgctccaattgtcctgtcatattttaggactggttaatgcaatttcacatcaccagttggctatgaacacaaactgtctgtgacatgtctccccacttgtcaccagaggcaccagccagtagttgagctggctgcaggtttgtgtgtgtgtttgtgtgcaagtgttccgttctttccccactccaggtagagcgtccaagggccattaccagctcagggatctagctgggacaactgtgtgggagttggctggggccaggtccagcaggtaaccttgcctcctctgcaccaagggccaggtctatttgcccagcgtccagggtttcctggctgttcctgtaggtattcaacatagctatgataagacttctgcccccactaacaggaaaggaggaacacggtattagagagaacctgattgagggaggaactcctcccaccccacccagctcagttacctacttgacatggcaaccacatacccccaccccagcccacctcccagtcagctccttcccaaggcagttgatagtatggaaagggctttccaaagatgccctgcaagccccgtgtcccaccatctgccctaatttagggtcagtacattctgccaggacctcatctacttctcatagtatagttttgctttctcaagaattggagttgtgaatcagcccttgaggtcttcctttaatctgtatcttgcacactttacagcaatccccagctttcctggcacgagaatgtaccttctctggctttcagtccaggccaacaggcgttctcttctttcctagtcttttgatcaattcagctgggatctgggagggaggagagttctgcaccagcataacaggatattgtgtgggactcttcctcctgttctggaattgcagctaacacccaaagctgagtacaaaaggcactggggaccctgccttctgcattcagagggttgtcagtgggtggtcagcagctagtaccatctccctcccgcagggctgatggctcttctctcatcaaccaccaccacctcccacagtgactggaagaggagcaggggatggaatggtcggttgccatgtggggagggcagtgtttgtggtagaggctgcttgctcccctcttcacgggagatgatgggtggggtgggtgcctttcctccctgataacataagataatttcttgtaaggagagacaagcataccatcccccaggggggcatctgcttagtctgtgaacccccttgtatacctctgagctgcctgagttggggaagagggcaatacaagacagatggtggagtggagagagagagctgtgtgaggtggctgggctcaagtggacaagctggtgtcccacccatgagggcgtctctctagggcttgagagaatgcacaggctgtccacgagacagtcaccagggcagagaggagggagtggagtagccagagaagcagtgacaatccacctaggagaggacatgtgagagttgcttccaagtccctctcctggccccgcagtcactgagagactagaaaagtgatagggaggcggatctggagctggatgctcccctccattgtggccttgttgkggggggagggccagtcaccactctcatctgggcagaagtgggaatggcaggagagacaaacaggaagtcttgattaacgaaatgagacagttctagtagatgaaagtgacggcggagttgtgggacgcagccacgatgtcattaagatccctaccacccagtaggaaagggatttcaatagagcacagttgactgtgtgtgtgtgttggaggggagattattaacaatttcacgtctacatcctaacaaattgaggccctacaaaaaatgtgctacacttgaaaaaaagtccttaaatgaggaagaaaacagctttggaactttttaggggtagaggattgcaaaaatgtgggatgggaacatgtgggtagtgaggatagatggaagagactttcagtagaggacccagggggtcgagaagctagtccttgttctctggcttgcaagtgacagaagcccaactcacactagcctgagcaaaaatgaggatttattggaggatcttggagcatctcacagaatctaagaaacagcccaataattgagccagcagaggggcggggatgtgggtgggccttagagacatctggaaccagggatttgcaagccacagcagccccaccaggttcttgtttttgcttcttgctgcagatcagcctcatttgttcttttcccagaagactggttttgtctaagacagaaaatatgaccactgacagcttctgagtgttgtaacttggaggttatgtcatgagaaagaagtgagtctcggtgtccttgagtctgaaaacaccagaagaggggcctccctggctgtgatgagtcctgcagaggaacagggctatgccaccctagaagaaagaaggtcagacaattgggacaggtgttcctaacaggaatctaacagcctgacctcatggccttacgcaaacatgagattctgatgatcccaccttccctccacttcccaggagtcatgccagctgcagaggccctgatgaaactctgtccttcatctctcgtgaagcccgtggcaagggcaacaaccaccacaacagtaatgctagtagctagcatttattatgcactttgcctcaggccctgggctgcactctatgtggattttttttttgagatggagtctcgctgtgtcgcccaggctggagtgcagtggtatgatcttggctcactgcaacctcacctcccaggttcaagcaattctcctgcctcagcctctggagtagctgggactacaggtgcgtgccaccacacccagctaagttttgtatttttagtagagacagggtttcaccatgttgtccacgctggtctcgaactgctgacctcaagtgatctgcctgccttggcctcccaaagtgctgggattacaggtgtgagccactgcgcctggcctttacatggatttttatttcatcctgactgcagctgtcttactcccctcactttgcagacgaggatgcagagacagggagaggttaggagcccaaggtcacacagctagtgagaggcagtgcaggcactctgcctaggtcagtctggttcccaagtccatgtttgccatcatcaagctccctagcctgcaggattgaaggtctggccctgggcattcccagaggaggtggaaaagttcactggtctggttgatggttctgccacatggacttacaaggcatcacagccagagcctgaggaactttctggggcctgtgcccttcacaccaccagctgtgccaccacagggtctctagacagtcatcatgagcacctgggaggtgatgctcctgtctgtaagcagctgctgtggtcagtgagtggctgcatagctgggtcctccatcctggtggctttggggacagtataggctctggttctcttctccctcmattctttacctcctttcagtctcttcccttctggttttcccccttcctagacgcctggcttccctgggcctgctgcacctgctctggctaggttggagagggctgcagggaggaccgcagtcagcagagggcgccaaagcctctcaacacaagcatggcccaggcctggcccagaaggagagcgctgagagccaggactggcgggctacgtgcgccctgtggattcccccatttcccatgcttcatccagccatgggcctgcagtgcactcacaaatgtgcatataccctcctgtgtgtgtgttacactcatcaaattgtctctgaatttgcttggcttcatgtgttcctgtgtgtgtttatgtgtgtgtgtggtgtgtctggtgtatctggttccccaggaagcacatttgacagccccacagtcagggtcagggcacagggacagatactgtgtctataacaatccataacactgattttgttcatctcaataaatgtgagaatgraataaaaattaatgtagaatattttgtacatctcaataaagccactttctgggggcaggcattataattctagcctctgttctactgtttgataggtaaagaataactttccacatagggagaggaatggacagctacccagccctcccactgttacaggcctgggctagaagctttccatctaggctcctggttgaccgtactagcagtcctgtgagccaggcaatagtagtcccattgtacagatgaagacagtgaggctcagggaagttagaaaacaatttcacgtctataccccaacaaattgagactatacagtaagtgtgttacacttgaaaaaaatctttcttaaaagtaaaagagaaagaaaacagctttggaactttttaggggtaagagattacaaaatgtgggaatggaacatgtgagtgaggatggatggaagaggccatcagcagaggacccaaggggttgagaagcaagttcttattcagcttgcaagtgacagaagcccaactcacattagcctgagcaaaaatgagaatttattggaaagatcttagagcatctcccagaatctaagtaagagctcaataattgagccagcagaggatcacacagctaggaagtggtcaagctaagatttggttcctgtctctccaatttcaaagtctatgcccgtttcacactttctaaagctgccctctcaaatttgtgttttccttccatgcagaccccaccaaagatgaacttgagagcagcccggtgaagtatcaggagcagcagctgctcatggctagaacaactgagctgagaaattcatgttgacagacagtttgtggctgatttctacgagtcaaagaataaggaactatatttagctgcttgctctgggctagttagctggtggggagtgagggctcagactgggggaaaaaaggaggaggagcaggaggaggaagaggaagaagaggaagaggaggagaaggaggaggaggaaatgagagagaaagagagatgcccagttgtctgctgtctggcctggggtccttaccctcagagttgggtctctgcagcaagctttgcatggaattgtggttggtggggcctctttataaagttaagacctgcccatattactaggctggtgggacagagaacaagagcctgaagaggtgaatcttccaggcttgcagatctcttctctacacacatgacatcggtgaatgagtcattctacacttgggggttctggagctctgtaaaccaacactcagcacaactcagatccaaaaaatagtactcagcactgcacatacattcttgatggcataggggttagctttgtccctttgattgacttgacctcagtcttctcctcctcctgggtcaggaaagcccttttcttcctctcaagggaaaatcgaggcacttgccctggatggacttgggcttggatttcccaaacaagctgcttcccagaggaagagagaggcaagaacctgcctcctcctcccacagatatctgagctctgccaggcctgccttcctcctccgtgtaccttgtcctctccacatgtaaccagtggggctggtccctcatccttctttccaamctgccaccaccctctccactccagattccattcactcaaagacatcagggagcaaggttgagtatactgacaatttgggtgggaagattcagaagatggtctcataccccacggagacacatgaaatccttcttccatagttctctccagcctctccccgacctcctcccacatacgtctcccacttccctagcccctcctgtccctaatttgcctacccagctccttcaagatggcagcacaaagggtcacctgtgaccagaactcagcttcctgggaaggcagtggagagtataaatttatggagacaaaacttttctctatttagaagtagcacaacaaactttctgggactcttgagtgtgagcagcttagaaaaacgggacatgaaactgaagcccagcagacatgcccatcccatccaccctgctggtgaccaggagccagtcccttgctgagagcctgggtttccttgaccgacaccgagtgatacctgagttctcccaatgttcaggcaggagctctttgttccagactgtgctgtcttgatggggaggcacaatgatccctgggacagaggccagggaagggccctggaattcccagcttggtcctatgctgctcagttgacyctcccaaacctccaagccaactgattctgctctgcccctttagggaggctcccarctgggccctggagcaaatgctgtaaacccacaaatctgctcagggttttatcccacctgggggccacagattggtgggagaatgggaggtgaataaaggcagtggtggctctttaaagaaaaaaaatgccctggtttgtagcagttgccaatttccatggtgtaaatactcccaccacagccaatttcaagctatcaacatgatgtcactgaatgcagaattaagaaaaggtgtgaaaatttcttttttttccagcaagctgacttcagcacaccactggacaaggtaaagtgcctgaatccggggactctaatctaaaggttgtactgaattcagccaggtagagccaagaaacagactgctgagtcggcacatccctttctcaggttgatttaagaagggagaataactcaagggagcattatgagggaatttcagaaacaatsagatcatttagcaattgaattgtctaaatattttttcctaatttaaagttgcgtgtcatgtgagtaattggacaatgcattattgaattactgagggatttaatgcctaaattggagaagcaatcaaacattcacatcttcaagtagttgatggacacctaaggaggtattcacatgatggctggggctagagggcgtgggaggccttgtcctaagtgggccctgagcctctcttgcaagctgcctcatgcaccgtgggccccagctaggcctgggctgyaccctcctgggccccctctgctgctacggtctttgtttgtcactctccagtttgtgtttttgtcgctaaattcttctatttttgcccttggcttcctccactctgtcatttcttcccagtctcaagctgtctctcgctctctgtttctgcctctgtctctatttgctgtctcactctgtcttcctccctccatctgtgtgttttgttttgtctgtgtctccatgtctctcttactcttctctccgtgtctcttccttgctgtctctctccatttcttttggagtctctctcttttctacacacacatccctggcctttgtcccccagtcccatgagctcctctcgtccctcctttggtttccacttcacccagctgcactctgacccctggctccacatctatcttggcaccatgctgccagtcaacaccccttcccccaagctgattctgccctgcctcagacctgggacctgtactatgaacccatagacatactcaggattatggcacatggcgggaggggaggccatggtcactctttgaagaaaatgaaacccctgatttgtagcaattgccaatttctgtggtgtaaatactcttgccatagccgatttcagacaacccgcataatgccactgaatgcagaattggaagaggtgcacaagtttcattcttttgagccagtgcaagctgacttcagcacaccactaggcaagaaggggcttcctgcatgcctgcgggggctggggagagtgcacacrtggctggctacagagcagcccactgtagccttatagagctcgactttgggccaacagcccactccaacctggttagttcttccttgtggctgactcatagaagtgctcaccttaggatggggcaggaagcccaaggactcactgacctctagacttagaaggaagacttcctagatgaaatgcctgggctaagtcacaaagcagatgagaaattttgtgttgccagagtatatatatatatatattttttgagacggagtctcgctctgttgcccaggctggagtgcagtggcgtgatctcagctcactgcaacctccacctcccaggttcaagtgattctcctgcttcagcctcttgtgtagctaggactacaggcatacaccaccacacccagctaacwttttttatttttagtagagaaggggtttcaccatgttggccaggccagtctcgaactcctcacctcaagcccctcggcctcccaaagtgctgggattacaggcaagagccaccgtgcccagcccagaatatacatttgaggctggaaaaggtaagagttggtgtcaaagaggcagaccgagggcaggatcactgaggtcttgaatactgagtgaaggggcctggtcttttcttattggcattgaggagagtaccatgattgaatatgttgccttaggttggttccctgcccccactaaacaggccttctgacaaggatttgggtgtagttgtttgtttggaagatgatcccaggcagcatgtgagggagtagggaagtgagacagggaagagaaaaaggtagataagagttacccagcagctactgctgtggaacactgaggttcagccccctgtggaccctctgagtgtacagaacaggtctcagacttgtcccattgaggggtgggaaatctggggtgtgtatccaccagctccccgcccttccttcaagggctgctcctggggtgtgaatccccctgatattccatgtgggccagttttggtccaaggccagatagttctctcatgaagagatgcagaagccggaggcatgggtgccaggacaggaggcggcagcagcctgttatggtaaggactgagtggtgtcctgtggaytgggcagcacagaggtggttgtgattttcaggagggcagttttggtgggataaaggggagcgagttacagggagaataagagagaaggacacacagagactatggactactctgaaaagtatggacaatgggaaaactgttgcacggtcgctgggactggtgaacaggcgagcttgggtctggttatggagttgctctgagccagggagacaagcaggcagacctgcgggagcagcagcatgtcaccccaccagctgccagacccgacccggattgatggaaatgtagaggggggcctccccagggcatcccagcctgcactgattcagactgagccaccagggcactcagctgacacctcacacttctgtcttcctccttgggaattgtggattggctcggcatgacccagttctacaagcatttatttgattgattggaagcagagaaggtctctgctctccaggggagcagaccccatgctaagcatggagcggatgggaaaatgagaaagacctactgcacagtcgaggggagaggcaggcatgcaatgacagatgcatgcagtgggctgtggggtgggcaccagtggtgccaccatcgagcatggtggaggctggagaagagggagctgttctgtctgctctggggaaggcttcttgcagcagccaagtcttgaaatgtgacataggctgagaggcagagaaaagaggggacaggtatttctggatttcaaaggcttccagcttgcttaagccttccttatagctgggtatcacacaccctcaggccgatagggctcactgactccagagacaggccttccatagccagacccctcctaccgtcctgtgatggagtgagactgcccttgctggggaggtgtcaacaagaggatgcttggaaggcaatgaggagggccacggcaggcaggcagmtgctttctttggttaggttcttcggtgtggtaggctaaataatagtcccccaaaatatccccatcytaatttccagaacctgtgaatggcaaaagtgactttgcagatgtaattaagttagggatcttggccaggcgcggtggctcatgtctgtaatttccagaactttgggaggccaaggcaggaggattgcatgaagccaggagttcgagaccagcctgggcaacaaagtgagkccccatctctacaaaaaaataaaaacaattagctgggtgaggtggtgtatgcctgtggtcccagctactcaggaggctgaggtgggagaattgcttgagcttgggaggtcaaggctgcagtgagccatggtggtgcctctatactccagactgggtgacagagtgagacccacctcaaaaaaacaaacaaaaaaaargggatcttgagatgggaagattatcctggattatttgggtgaaggtcaggggaggaagtaggagatgtgacaatggaagcaaggttggagtaacatgagaaagcggccactagcccaggaatgcaggcagcacccagaggctagaaaaggtgaggaaacagatcctcccctagagtctccagaaggaaccagccctgatgacaccatgactcaaacccagtgaaactgattccagactcctggcctccagaactgtaagagaatgaatgtgcattacgttaagccaccaagtttgtggtaattcgttacagcagccatggaaacaatacacctgggaagcagactctgatgaagatgtgcacatgggcatttgcatgaggagtgctcttgggggcatgcccctcacctgtggggagagaagagcagaggtgggcagttgcaggtgattccctgggaagctccagggctgtggtggcctgcagagttaccccagattgaggcaagagagcctggcccagggacttacacaatcattggatgaggcttccctgtgcaggggatgtggctttaaatggggcagctccttttggccaagagcagttcatggagagggactcaactttgagccctcggccatgctcaccttggtcccgaagcaggcctcggaggcacagctacgcatccccagagctgtggaaggtgcatctctctgaatcttctttctttgctctgtgggcctggtagttygacaactttctaacatcctggacttcctgatctattgaggaattctgcaatgcatccacatctctccctgggcaagaaattgggctttgagtcccagtttctataattgtcattaagtgttttacatacactgctgtctttaatcctaggaataaccgtagctattagccgcattttacagatgagcagactgatacttgaagaacttcaatgaatgctcagagtcagagctgggactcttcctaggtctgcctgatgcctcttcgctaccctgtgactttgcctctcattgtccacccttacttattagctgcatcatcttgaatagaccactgaacttcttttggcctcagtttttttaaaaacaagactctagtctctgtcctgcctctctcctaggactgttctcacttggctccaggagagagatgtatgcaggctttgtgcctgggcctgagactctgctgctatgactccctggatccagcgagtttgctcttgctgtacctccctttgcccagtcccccagtagctctgggcccctggtccaggggagaaggagaaagcaggacaggtagggggtctcatatgaaggtctcttctctggtgccttgtggttttcaagtatgactcacccctttcataccatttcccccagcactgggaattatgcaggactgccgtgcatggttacatggttcgtgtgccaggcctcagccaagggtgtggtggggattgaaacccagcccgcgccgggcactttttgcttagcacgaaggcaccatctgccaagaggctgtgtctgcgcagaggggcctgtcttgtttcattctcacaaaagtcttgcctgggttctcagtggcccggaattatatgttggctttgcaggagcccagggctggcagctcagccctcagaccctggcattcagggcagagaacgggtggtgatggatgtataggagggagaagcaaacccacacccaactcacagtcacatcgccagaaaccactgattctgcaagtccctctgtgggagctgtccagtttctcctggagacaggcagagggggcggggccccaggactcctgggctgcccacctcaaagcccttggcccagtcccctgtgcagacttctggcacagaggcccgcatcccaggctgagctccctggggccaaccacagaaggtccaagtgctctgcgttcctgcctatgtttttaattaccccacttactttcccattcatctttcccttcccagtcctttctgtacagcccccagactaatgtgcctcaaatcctgatctcactgaattccttccctggctcagagacttctatggctccattctgtccaggctcggcatttagcgttcatacacacacccctctccamgggcgacggctgttcctcttttctctcctctgattccgcctgggctccctgtcatctcctgtcccgccacctcccacctccagacccttggccagactgttgccttcctggatctccttccttactctctcctttccactatctaaatrttaactttcctttcaggttcccctcacacagagcggaagcacagccctggcatcaagtgggagcatggcccagggcaaggagctctgggagtgcagcctggggccttgaatgacccggaggactggatttgaggagggcgcctcctgaaccttcttctgtcctctagagggactgcaccagatggcagcttcctgtgagcgggagccctcaggtcaggaattgagggtgcatccagctgtgagccaggggccatggagcaaggctcacccgcttcccaggaggttctcaagggctgggctctcaggtagagaaactgaagctcatcagacctctcggccacggctacttcaggctcctaggagactcacctgcctgtaaagatggtaccaggagctaacaattgctagtgaagtctaatatgggagctgctagccacacgcgcttctgagcatttgaaatgctgctgttcccaattacaatgtgttaaaggtgtaaaatatatgccagattttgaagacattgtgccaaaaaaggtaaaatttttattaattattttatattgggtccatattgaaactatatatatgtgtgtatatatatgagtgtgtgtgtgtatatatatatatatatatatatttttttttttttttttttttttgagatggagtctcactctgtcacccaggctggagggcagtggtgcaatcttggctcactgcaacctccacctcccgggttcaagtgattctcctgcctcagcctcccaactggctggaattacaggcacatgccaccacgcctggctaatttttgtgtttttagtacagacagggtttcatcatgttggccaggctggtcttgaacacctgacctcaagtgatccgcccacctcagcctcccaaagtgctgggattacagacatgagccaccgtgcccagcccacattgaaacaatatattatgaatatattatgaatatattgggctaaacacatttttttcacctgttttctttttcttcttaaatgtggctattaaaattttaaaatacattgtggttcactcacattctgtttctactgaacactgctggtcttgggcgtagaaaaccacaggagaggtccgtggatggtttttcacagtgaaacaggtaatgtttaggaatcaggttgaggaaacggaggaggcctctgattccagccccacacagccctgaccgtggcaggggatgagtgctggcctaatgacctgccctgtggccagagggcatggcttgcacagctgcaccctgtgccacacgggcctggtgaggcagagcagttccctgctggtgaagcagcagctccctgggtgagcctgcgcatggtgaggggttggagaccgagaacccagggaggaggctgaaggacagatcctctccagactgccctcattaccattcggggagatgactcagctgaggtccctgctctcctcaggccatgatgcgggccatgatgatgaccactcacagtgaatcacacggaactacactgagaatgtgtgtgtgtgctggggggcaggaaggattcccagccaggaaaggaggagtagaggcggcgcgtgggtcccactgcacctgctcacagggtcctagggctgctgggaaatgcttccggggaaacccgaggctcccctggtcccaggctccttccccatcaaatttgcagctagagtacaaggcgtagggcttctgagagccatgaacaacagagttctccctgtccccctttcagacccaaagcagctctgggccagccagttaggcttcctccctctcggcaacacctctgccccagagcacagggattgcccaggactcttgcaacctgggcagggtgcctggtccctggggcagccaggcctccccatggagtcctgggcttgtggaggaggaggagcgccctctgtaggctggcacacgcaagtgcaggctccacaggaaagaggaggtggctcaccctggaggctgcaccttgtggctgtgggaagccacagatcctgcagaggtcctctctcctgtggctacagcttcttgggttacagaataactgttaattctgaacctgactacttctgtggctttccaacagctaccatttctttgagtcgaagtttgctgggctaaatgcatcatagacatagccatattacaacctgtaaggcaggtattgttatttctaatttctaggtgagaaaacagaggctcaaagaggttaagtatattgtccacggtcacacaactattacctggggcccgattccagagtccaaggactaaccaattcacactgcagcccacttagggtctggccttctaggagggaaagagaggtgtgaggacattcagggaaacagctctggtgaccttcagtgcggcgaccaagatgaggtggggatgatggagaaatggagaggatccaagccatgggatggaagtgacaagaggccattgctttgagttgccctgagaagacgtttgtcaatatctccccagcccagttatcatgggctatttcttgacatcttgacatcacccctaccccacacacatatggcagccccattccactacacatgcaccactagtcagccatggggcatgcactgggacttcatgttgtcctccatttcagagggggaaactgaggactaatgggggctgggatttccccaatctcaggccatcccactgatcactggcagacttcaggcctaccccacttactgagttaaactggagtgcataccgagtctgccaaggagagagaagtctggtgttgcctctgagccttctttaggcctgtggttgggggcctcacgcttcctctccccaacacaacagaccttgtatctcttattcaagtttaccgcccctccttgtgcctttgttccgccacgttctctagccccctttcctattgagctaggagttttgagaactcattgtcaccaactccccccaccatcatcttcatcttctccgccactgctccgttaccctcatctcatactggtcactacaatgaccttcattgcccccaccactctaccatggcctctagcacttgagccgccaccttgatcttcaccattaccaccacgacctgccattgtcatcatttctatcctttgtgatggcagcgtcactattttcctcctcgccatgacttccacccctcacctcggcattgccatcctctccactatgactgccactaacatgacctctgtcatctccacttcatctgcagaatcacatccagtatcacctccactatcgctgtcaccactgctgccactaccagtacctccattatatttgtcctcactaccgccatggctctcatctcctccaagcccattttcacctctgttgtcgccattatctctgttgttcatgtcactatcattaccaggaacttcatcaccctcacctccacctctgccgtcttctcaactatttccaactctatcacttccaccattacctctcccatgacctccaccacctccatcatccctatcaccactactctccccacaaagttcagtgcctagcattgttcctgggacttgagtgaggagcccgggcagagaagaatatcctgcctggctgacagacatctttgcgcagatttctcagagcagagcatcggcaagccaggtgtccgaacaatccctcctcttgacctgagagctgacccttcctcaggatgcttctgacaggagacaattcagtcctctatgtcagccatgcccgtacgtaaagagacagctgctgtctagttgaaagattgaggccattaatctgggctgcccttgtttgcataatgattgcatacatttgcatcctatttgctcccagcctctgaatgctgcactactggtgttcgggtacaatttgcatatcactgcaggtgagggtcagacttttgagactttggctcttactaactccctaaagaaattcttttatgtgccggctcagaatagaacttggaatgcttaattctagagtcagtcagctgaagggctctaagatgggagggtagggaggtctattccagagctcctggaaagagggcagccattggtgtggtccaggaaggagagtaacaggagatcgactgcggagacaagctctgctcctggacagtgccctgcacagtcactcctgtcctctctggtccgtaatcactcactgtgaggacttccttgaactccctctaagtggaaggaaggagtcaaaccagctgatcactaatcccccttcattaaactcctgttctgaactcaggtgttctcattcctgaccgtactttagaaccacctgggagcttttgaaaaagaccagtgccctggccccacccctagatatgctggtttaattggtgggccctgggaattggttatttttaaaaagctcccttggtgattctaatgtgcacccagactaaatgctattgcttgtgactccgccctcccgtgcctgccaccagcctccttcatttctggttgtgaatctcttccccactacaagctcagcgagcaccagggtctggcaggacagtggagctagtgcttttgtttgaggtcccagaaataagtccttttccctcttgagcagtgtggctgatggcacttggcaccaactggaaattccctcctctctgccttggtcttgttccatccagggggtctctgccatgggggctggtccagagaaaggtcggcaggggcagggataggaaagagaggctactcctgcacagccctcctccaccctgtctcccagagctgcgcgcctctcccctcacaacacttggcccaccccagctgcccaggctttgctgctgctgcttccatgcgggacctgccagccccatcttgggtccccacactcacccctgcagactgacttcctgcaaccccagacccccagcccactccccatcctggagaaggaatgcacaaggaatgttcagagctttgtttcaaaacaagatgcagtaaacatggctgcatctgggccctcccacacttactggggtaatcgaaggcatagagagggacgagggaagtaggacagagcttcctgcacacaccacccctgtcatccagccctggaccatctcggcccatcggtggggcttcagctgccaagggtggggtggcctgtgagatgagggcctgctctgcagaggaccagacaggagactcagtgtgggctgcgggaggatggcagacgccaagtgaggctgtgggcagggaaagaggtgaaaacggaagctgcccaagagccaataccatggcataacagtggggccctggggttcgcccatcagcattcacatccggacttggcaaatcactagctgtgtaacccagtgcctcaggttcctcgctggtaatgagagggtaatgactgcacctgtttctgagtttgaattcagtcatgagggtgaaatcagaatcagaattctgattctgttagataaagcatgcgagtgcttagcacaaggcgtggaacatattaattacccaattagtacagcttctgtataattgtgagggtaggggtcacgtgcccttgttcgtgacctcctgaagctccagcccaccagctgtcctttggggttgggtcctgggcagtggaggcccttcctagtagctatgttcttcctcctgaaaggagggagtatcccttcctccccactgaccaaaggtctggtggcttcaggccaggactcggttctgctggcaagcctgagggtaggtgcaaaagcccaccttctttcttcctctctgaggggggtaacacagaccctggggcccagagaacttggagttttatccacggtgcctctgtgcagttgttagtgggtagagagctattatcctaactccaggaacaaaaagtggccttggggtcattcaatgtagccagagaagaaggaataaatgaatgaattctccagggaagaggcttagaagaagagtgaaagagaggtgagggtgagagcttggaagaaatgcagccaatccaatccaagctttcatatctggctcaggaccaagttttggaaagct

SEQ ID NO: 97083 - DNA, 14586 bp, Homo sapiens
aaggtcacaaggcctggggttgttcacaccacaggcacaatacagagctgtccactcttgaactggacggtctggggagaattgagaagctgcctctcactgcatggatagtggtggctgctggctttcaagcgtggttttttgctaagagccagaggcaggtcttctggagttctcaggggggccctgtgaccccctctccacaaccatggccagcatcggcttcttgctgcacctgtgcattctccacccctccgccaatggcttccagctcctaaaacacctggacattccccatcctgcaccggcactgtgtttgttcagagaaaacgaagggtgtcatttcttcttttccctgtggcatcgtggatcctttacatttagcaacaacagtgtgaggctccacttctgttgaatatgagcggctgtcacacccatgagcaagtttccttgatggaagatgctgtttctccggcagaaccaaccctccaggacgaagtttcagaattggctgatggtcgtgagtgcaggtgtccctgttgtaatttgcagggaaattgactgcaggtgatagtgttgacgtctgacgtctgacaacctcctatgtgcatgtctaaatagtcacaatgaagatgaaaataaggatgatggggacggggtccaggagggccactgggaaggcactatccagaaatagtggacagaggtctggcatgtggaaaccttggatctcggtcacagggaggaaggcagctagaaatgggagggaagcttctgggtaggcaccatagtaggggaatgtctaaagacccactgctctgagatgtggtcagagaggtttctgtggactgcagatgaggcctgagccctgcctatgctcaaagccagcagggttgggggtccgcctcctcactgctcctcaacagctgtaaccctttcctgagggccccgacttttcagaataggagcagagagaagcccagacttccttccctggagtgtagacctgtgtgtgggacctgctccaggctgatccctgtccgcacaggtgggtgatgtccttggctgctgccgtcagaggcagccccctgcacagggaggggctgatcctgcctcagctgtgtggccatgtgggggcagcaggggcctgggccatagctgggggaggccagaccctgagggctttgcagggcggccagtgcagtgatgcctggcgcttccagctgagacaggagtccggacagaggtgggcagggtggatggcttcgggcagggaaggcgggtagaggctgcatgtgggggcccctgtctgcctgtccttagggtgtggattaggctctggcttctgtgatggtgcaagaggcaggatggtctccagacaccttcttgcagagtgattttgaccaatgcctttccagcaccttcccctggttatgacagggagctcccaggccaggccacatgaccccacaggtaggctgaccccatggacccactggagactttgagggcagagctcgggcacctttcatcttccttgggtggtcctcatgtcgctgtccgctcatgttcctggtgttctggcatcaccttgtgccggtgggggctgggctcccgtgaggtcctagggcagaaggaggtgcttgcagggcctctcgctgctactgggacatccacaggacctaatgtttatgtggaatctccaggctgccatcgagggctcctgagctcatcctgaggacccagggtccatctgagctggctgtgggctgagatcctggctggggccctgctgtcaacctctcctccaggccctgccttgtccctgctcctgtgctttcctctcttcaggacaaatggtttgtccttatggtcccctttccactaggattttctcatcctcatctgtctatcccagccggatttaaagcagtcacttcagacaggagccacagggagcctgtgagggagtagtgcggtggtggtgagtgtggctgccctggctcccccagctcaccgtggtgctgtccttgacccacgagctgttgagaagggtgcagagcccctggcacagccaaccctgttgcccccagtgccgctgcccagcttcggccatccaggtggtgggtagacagaggagtgaaccccaaaggtgtccatgccccagttctaagccctgtggccaggtgctgtcacacagcaaaggggactttgcaggtggaattagggttagggatctaaggatgggaggggaacttggtttatctgggtgggctcagtgaccccttggaatggctgagggaggcaggagagcctggaaagattcgaagtgtcacagagatggtgccgtcattgctggcttaaagacaaggggccaggagccaacaccagaggccactccacaaccccagcgccagtcagcaaggaagccgggtgtcgctcacacaaccagaaggagctgagtttggcaacaacccaagtgagcctgaagcagattcgccccagagcctccaggcgtgagtggagcccagtccagcgacaccttggtttggcctgtgagactgagaagagagccagccacgccatgctgtgcctggggtccacagagccgggaggtcacacatgtacatcctggaagctgcccaaggtgtggccacttgtagggcagtgagaggaagccgtcgcggggaccatgctgccttctctgggctcacgactgttctggaaaggaccccatggcagacttggcaaggtctccacttcaggggcaaacatctccatcatcagcaactccaaaccccagccacttcctgggagttcaggaactgtgtttagccataatgtcccttggggtttggtgaaaaacaacttcctttttatttgtgggaaaactgtattatattgccttatttatttttaatcatgtacaatattcatgtacaaatgttagagccattcgggtaggattctctctaaattatttattgaagaggctttgtaaatagtgcaccagtgacaggtgctgcctgtttactcgtaccaaaaatgaagacaagccccacacccacctcagcccttgcttggccatgctgtggccctttggaaatgaccctgtgtgctcccctcgcgacccttgcatgcctttcatgcctgatgccgtagagtagaacacagccccggaatgcttccagttgcttgcaagggaccatgccggcccgggtggtccatgcctgcggggtgtctgtatcctgcaggaggacgcccctacagacccagcaacccaagttgccagcccgtgtttctcagactttaaagccaccagggcttctggaacacctgtcatagaagcaataactctaactctatactgtagagatgagtctggtccgaagcagattagtaatttagagataagccatgcatacaagtttgccccattctctggcttggggtggtgggaggcggggagctgccactcccaaagcctccaccccttcctgaagacccagctatgaaaccgcagttcctgtgggttgggctgcccaggctggtcagagctcagcaccccaggtctggtgagcagacagagccggcgttaaaccccgatcaggtcattgtcaccacacccttgcttggatgaggaaggaaggaggcaaaggcacccactccatccaagatccattccaattgatgagcctcagtactggcctcacactgaccaacggtggtatgctgcagtttgttggtttggtgcagagtctaaaggataacatatcaaggcttacctgtgataggccattttaaggaaatggtggcactctgaaggctgtccccattcaccttccacaatgctggtaccatcctggtagaagagccctctgaacaggacacctgttcaggcctgggggccccatgctaggcttgcctgggtgtgagaaggtcgaactgggtggcttaggccttcaaattgagcttgggggtgtccaagagaggggtcttattcgaggaactcacataccccaaataaccatcagtgcacaaatcattccatgctctttggcaccaggcaggagatgctgcaggcaggtgtccgtagttggcaaaaatgggcagtaggggaaatggagttgcttcaacctttctcagtcccggccctcactgcacccaccaagtcaagcagagctgggtgggctgagaccagcatcccagctggactgagcctggggggaggggctggagccaaggagcccccctgggtgggggcatcaggagcaggggcagggcctgaggactgctccccctgcatggagggcaggccaggatggagcccagggtagactttgaggaaggctcagtgggctcagcagaaggaaggctcttctcatagttgtggtttttcacagatggatttgggtgatctgagtgtggtcaggccctgccgttggggaatgaatgccacacggggtttgtctgtaagctgcagtgtctgtgattctgtgtgaactgacagcagggagctgaaggacaggccccggccttgggagaggacacgggcatgggctgctggatgcagggctcccagggctgtgaaggcagaggggtctctggaggcagacagggtgggctgggggccagcagcagggggcagagccccagccagggcagctgcttcctgcacatagacattcctcctgcgcagggccaagtgcccatgagcacagccccagacagacacggtggggagcttggagccctccgctcacctagaggagccctgggacacgcactggaaagtattctaggggcttcctgccttatccttctgtttgttcatacacttagtgaaagcagatcctgtactaggatgtgaggatatctgtcacctgcgtggtccattccataaacaccagattccatttcagttgccacacattttggggctagacttccctaaacaacatgccattgtgaaataatgcatatatttgtatttttaaatttccctgaaaatttaatctattctgttccatatgaagtctgtttcactaccttaaaaaatagatactccactagaggctgtgcttaattcaaatccatgtgtgtgcctgcattacatgtgtgaacacgtgtttctgttgtgtgtgtcatgcacatctgtgtgttgcatagcataagccaaatgaaaatcatttgttcatgggattcatatgaggaacaaaattaaatttgaatacagtcagataactgccacgcagggcatttggggaaccatccccgaatgccctgatgtgatttccctcagaaaatccttgttattagaggagaaggtctgggcaggggcagcagcatctcagacatcaagtcaactttatcatctactacatcagcactgaagtccaggggcattgaggcactaactaggttccattttctttggtttggttacttattttttctttttgggttctcggtgtgcagaggctgtagagagagcctcagggcggtgaccgctgcaggaattcggccctccagctcccctccagttaccaggagccgatttggaggccaggccttcccagctgagtgtctgtcagcttcattctctctcagctgtgcagtggaagagcaacaacagacaggtgaccttcttgggttgtgcttcacaatggactgggaaaaacatctttgaaatcaggaaatcaggccgggcgcagtggctcatgcctgtaagcccagcactttgggaggcggaggcgggtggatccattgaggtcaggagctcaagaccagcctggtcaacatggtgaaaccccgtctctactaaaaatacaaaaaaaaaattagctgggcgtgttggcgggagcctgtagtcccagctacacgggaggctaaggtgggagaattgcttgaacccgggaggcggaggttgcagtgagctgagattgcaccattgcactccagcctgggcgacagagcaagactctctcaaaaaaaaaaaaaaaagaaagaaagaaatcagaaaatcgaccacagtggtagccacctggcctaatgctgtgtttttgtacctgacaggggtcactcattttaggcacaactccttcattctttgtgaaattagtgagtttccttctacccgtcaccagattcaatatgttctatkaatacaccgataaccacaggggaagggcacttgtcgctctcccacctggttaccacagtctccatgggtcttttgccgtgaccacaaataaaggaaacactcatcactagtatctaagtcgggctttacagtaactatgcaccttctgtgtgcttcacctcactctctacttcaaacagcccatggagggaggtattattatactccttatgttgacagtgaagaatctgaggcccagagaggttggggacttgagtaaagtcacacagccctgagaggcaggaccagggttccattcctgctctatccagttccaagcccttgtgttttccattatgtttagtgcctctttgctaacagcaacatctgcaagatttgtgttggttttgatggagaactctagctcatccacatgctagtgcccaagtggtggaggggccacctcagcaggtgggttctgaatgcagccaaggctgtccccgcaatgggtgagactcgctccaactgcccgccctcagagcaggtgcctaagtcctccctggcactggcaggccttacctcacattgctaaattaaagcaatgcaattcctcttgggtaagaggaattcctccttctttactaactgatccccagcaaggaaataaaatgttaggctttaaaaatccctactttgtcatatcagactatattctaaaactatatttgagcgaaacctgtcattgcgtctaatttcaaatatacagaatctccttaagagctgttgccttatttttttgtaaagcctctctgacatcaaatggggagaaatggtggcacctccagacaccctgaaactacacaccatttcttccctgctcagcttctgctcaggagttctgtgagctatgggaaggccattggttgkatttgctacttttactttcatcttcctctgctgtagagccatttaatgttattgtcatatgctgctggtgaggtaaaggtgggtccgggtgccttcccaggggttagaggatgttcaaagggccgatttcagcaggagttcagagggcttatgatggatggtgagagatttgacaaccaccagagcacatgtgctctgaccctctcctgggcattggttcctgctggtaccgggcggttcagaccttcaaataggttgctttcaaaagagctttcaggcacttattgagaattaatgtttaaacagacataatagcctagatgaactcccaagagatctattaaatcttgtgggctgaataaatatctcgtgcaggactgtgcaacagtagcccagagcatcctgcctgtgggcatccacctcccaggtgagggcagtgggaagctggcccgacggcagccagaacttgtttctcacctcccaccagcaaccccccacccaactctgggccccaggcacacgaagcacaagtctcaggggaccattcccacattgggggatcctgagggagcccatcaccgcctcttgcatacaactgtccactaggaggcacgcccagtgtgggagagatgtatggtcttgccttccacctgtaaaaactgcacatatgcaagccatttgcactctggaactgcatgccgtgaaaactcctaatggtgtggaacttagtttgaatttgaaatcacgccgcatgcacmaagggacaggcccaggcccgacctcaggtcatccgcccgctggctgcagagcatccctgggagccaaggcgaggcccgtggagcctgagctttgtgtagctcgagctttgtgtagctcgtgcacttattatgcaccacctcccttcagtcaccactcctcttcctccgccatcctcatttatactgattgcacaccccccgctcaaacaacaatgtccttattatgatgaccatctcgtagtggtacattccattcctatttaaggtaagcccaaagcccacttttggattttctcgactgtccgagaaaagttgtgtaagcgcctgcgttcttctgggtttggctagatagggttgtgtccctctatggaatggagagtgatgtgggcaagggtgtcattttctcgcacaatacaactcactgaggatgcttctgtagaagtgagaaacacgatgagtacattcagaattacaataactcactctcactgggtaacttctcatgatagatttgtatgatcaatacgggtctatttttatgtcaactgaacactgtagggtaccttccagtctttttcaagattgttaaattgagacaagtaattgaataatttgtcctatttttattttaaaaaaagtgaatggactgaaatgttaaatgtgaatgtacatttcttaattgcaacttttctactgagtgtttgcactatactttctggaatcttatttaacaaaaataaaggraaaaaattgcttgactaaactctgtggccatttcagttgaaaaataaatggttatgtggatgttttgaagacattcctgcctgtttcacataacttctgggggaagttttattattcaaagtattaaatactacgtgaccccatttagactaaaccacacatgaactgttatccccccattacatactattcttcttcttcttctttcttttagacagagtctggctctgttgcccacgctggagtgcagtggcgcaatctcagctcactacaacctccgcgtcctgggttcaagccattctcctgcctcagcctcccaagtagctgggattacaggtgcatgccaccacgccaggctgatttttgtatgttcagtagagacggggtttcaccatgttggccaggctggtctggaactcctgagctcaggtgatccacctgcctcggcctcccaaagtgctgggattacaagtgggcccccgagcccagcccattatatgctattcctatccagtgttttcatcttgtgcctttttgaatctcacaattacattttagataatatttaaaatgtaatatagactctccattttactagcctttcttgtatcttagaatatcttgctgagacagtattgcttttttggtctctcagaagttactgtagctcaggatgcaatgataagttcattttacattcatctgtaaatactttatttcatttcctgtcttaaaagatgaaactgattacacgatcagttgataatttttttttaagtttgataatatcccattcaagtttagttgaatggtgaagatggcttccattgttgtcattgaagaatcttctgtctatcgagttgtttttcctttgtgtgttttcctggggttcttcaaagaaacagaaccaagagggcatgtgtgtgctgtcagaaagagagagggggcaaaaacaggacagagaatttattttaaggaattggcttacatgattgtggggctggcaagtctgaagtctataggaaaggccagcaggctagagccgcagggaggaggtaatgttgctacttgagttggaaggctgtctggaggcagaattccttcttcgtttgggatctcagtcttttttcaaaggccttcaactaattggataaggcccatccacattgtgacgggctatctgccttactcaaagtctactgatgacaaatgttcatcacatctaaaagataccttcaaagcaacatctactcacagggacatctgctgctgtgtttcaccaaacactgggacccatggcccagccaagcacatataacaaccatcatgagtggtctatagtttttctctgattgtctcttcaatttcagatgaaatcagttccttatagagagaagttaaaaaaatcattatgaagagagcaatagcccagtagaaaaatgttcaaaaagcacatacggaattataaccacctgaattcttcctgcctgctgcataaagaccatggcattatagtggagaaaaagtttaagagacccaaggctggtcatgccacatgggagacagagtttgttctggaatcatctcgtgctcacaggttagaggtttttcaaaggcagtctggcagaaggggtggggatggtgaggtaacagttacttgctgctgattgtatgaaatcacagggggggtcagagctgtcctctaggctgaatggcttctgggtggagccataggagcagggttggtgggtccaagtagagccatgagtgtcagacatgccaaaaaacctgaaaagatactctaagggccaatctacaataatggtgtgattgcaggggtaattggggaaggtgcatatcttataacctccagaataatggctgatactcgtttatgtctgcaccttagcaggatccgggctctcctccttgcccccagcctgatggcctcccattagctttacaaaagcagctgagttttgggggaggcctattatcatttaaagtataacttaactgtctctcggccaggcgtggtggctcatgcctgtagtcccagcactttgggaggctgaggtgggtggatcacctgagatcaggtgatggagaccagcctggccaacatggtgaaacactgtctctactaaaaatacaaaaaattagccgggcatggtggtgcaaacctgtaatcccagctactttggaggctgaggcagtagaatcacttgaacccaggagagagagattgcagtgagccaagattatgtcacagtagaaagaaaagaaaagaaaagggaaggaaggaaggaaggaaggaaggaaggaaggaaggaagggaaaagagaaagaaagagaaagaaaaagaaagaaagagaaagaaaaagaaagaaagaaaaagaaagaattttgtcccaggaagagggccggcctgatgtggttccagcaaactgacacaggccaaagtgtgcatgttacagagaagatcaggagggtgtcaggacttccaaacaccctggagcaaattctggaggcccagctgttgccattgatgtggcagatcccagcatacgaggagcaaaggagagatgaccttcttctggctctgagagtccataaccctttgaggaagattaagcaacaggcacattctcacatttatttaatctttaacacccctactggctaggtattgttaactgaatatcacagatgaaggacccaaggccagagaactaaaggctatgcctggcctaataccttttccactacagtgctccctgatggtggactttcatatcaaaaaagcacaaacagttacaagcagttacaagcagtagcagtaatagaagtaaaaatgatggcaataatgccatgcaatagaatgcttattatatgcccagctgggttctcagtgtttggcgtgtagcaactcagtgaatttctgcaacagcatcataaagtaagtactattattaattccatcttgcagattaagaaactaagtgtggctgagaatatagatggcagacatttctttcagatcttacaacttagaagggctctggataatttggaattgctagtacctgtgtctctttttctggaggcctttttctgatgccaggaaggtccgctgtacctgtttttaaggcaaagagaagtgccgagaccagctcagttggggagaccctaacccagtggtgctagaggaattaaagacacacacacagaaatatagaggtgtaaagtgggaaatcaggggtctcacagccttcagagctgagagccccgaacagagatttacccacttatttattaacagcaaaccagtcattagcattgtttctatagatattcaattaactaaaagtatcccttatgggaaatgaagggatggcctgaaataaaggggtgggtctggctagttatctgcagcaggaacatgcccttaaggcacagatcgctcatgctactgtttgtggtttaagaatgcctttaagtggttttctgccctgggcaggccaggtgttccttgccttcattccggtaaacccaaaaccttccagcgtgggcgttatggccatcatgagcatgtcacagtgctgcagagattttatggccagttttgtggccagtttatggccagattttggggggccttctcccaatatgtcccccttctttgatttgcaaatcgataaaagcaaacgcagcttcgtcacggtgagctacttctctcaggagtcaggatccacatctgcagactatacaaagacaaacaacacagaagggtcatgggtgcctatgcctgggggcccgcagctgagccccgggggaggcgttggacagatgccctctccgctgcggcgccagtttcccgaacctcctggcaggcaggtggtgctgagggctgggcctgctgtccctcgcggctccatgcgcagggcagctgcatggtgcaggggcgcacggctgggggtgctggtggggcagctacggaggtggttcacgcgtcccaagctagggttgccccacaggggaaggggcgcccgggcgcggccgccggaggcatttggcctagcttgggagccgtagagcccttcctcaaccatcatctcagggcggcttcacgtcccctccacccacgcggaccgagctgcgcttcccttccccctgctcgggcccgcgctgggcgtcccagactcgacacttcctgaaggcctgtaatttttaattatagcagatttatgttgagaaaacttcatactgaaatcactgatttattttgggattacccaatttttttcctactattctcagatatctatcaaactactgctctgtggattcttatattaagtttatccttttctccatcttttctttcttgccacctaatgaaggaaatgtctccaaggtctttttgactaatagaaactaaatgtataactcgacatctagaagggtttcaagatagtagatatgtctgctgggatgttttgtcattaccctgcccaatgttgcgacgctaggagtttccttgacactacattataaataaggcccaacctgttagcaaaaatatcacattccctaattttctctcctttaactgtgtgtaatttatccaggcatgtctttagttcagtaaaggttatttccctctttttcattcatacacaaataagtctggtcaattattattatcctaacactagtttttgtgcatacatccaccccaaactctcatttttagtgttcttatgccacctgtatggaatggcttataattttatttttcccaactcacacttgttcattataactttaataattcattgtaagtactctattatgctgtcatacctaatacactatgtccaagcacttatgtattgaagtctatattattttattgtaaacagtgcttgcttgtagaaatttctccattttgttatgctagggtattaatttttaaaaaatatgtataagaaggttatattatctataaattttactgaagatactatttaaaaaggaacacaatgtctgctaagagatggaatattggactgattacctcagcttcagagtccttcagtttttgaactttttctttgaccttcatctcaaacacctgctccatctccatctccatcttcttaattttagctacttgctcccttctttcttcttccatttgtgccagagggctcctgtcatgaatattaagggtaatcattaaatgtctgtgaataaaaattataatagaactatgaaacagtttgatgaaaacagagatgctataaatgtatatatgccattattaatatatttataacctagaacttctttccatgatatttcatatataaaacttatgaaaaaaatgtaaaaagcaaagatattctctaaacctactacatatcaaatctaaggatgatgacataccaaataaagtgtagaaggaaaatggggaaaaaaattcccaaaatacattcacagaataaaatatcagaagaaaatcatttaattttgttctttaaacaacattttaacatgaaaaacagaaaatgagtaatgaagttaatgtatgtagagtatttttagttttaccaaaatttcaagtgttacaatctcttctaagacagctactaacaccacaaaaatgaacaatattattatttattttggtaactgaactgatatgctggaaatcactactagtcaatacctagagcactatataggtatacagagtatttctaggccccttatggtaacttcaatgctcttgaaaattcattccacttggccgggcgtggtggctcatgcctgtaatcccagcactttgggaggccgaggcgggtggatcacgaggtcaggagatcaagaccatcctggctaacatggtgaaataccgtctctactgaaaaaaaaaaatacaaaaaattagctgggcatggtggcgggcgcctgtagacccatctattcgggaggctgaggcaggagaat

SEQ ID NO: 97084 - DNA, 14007 bp, Homo sapiens
tgtctcctggctgcccaggatatcacccttgcactcacagggcctctgtcctccctcccctgcttgggcttcctaccacccctgccacactgacgggggccagcctccccaactctgggtattagaaggtgggattggcatggatttggttcttttaacaaacgatgccagggtttgaatggactgtgtgtgtgggagagtgaggagcagccagggagatagggaggaagagaggaagttccaagatcacacctccaacataacgcagagataccagtcatgtcttctgttcacaggactcattgcatttagtagaaactattttctcatcctttatctttttcctaactttgtgaagcagaaattctttgagctagaatactggttgcgaacctgtcaagaagtgtctctgttttctctggacagtttgcctgctgccctccgtatgctggtccctccctcccctgactcagggttgcagaggcagctatgccggggtcctgtgaactggctggtttgcacccccaccgacaccatgctgctgcccccagcagtgagttggaagtcaggctttgccctagactctactctttgctgccccttccagctgaggggggtaccttctgccccctacattctgtatgccctacttgtaaatgtccctggctgttgaggtgccaagagtcctgaacccagagagtctaccctactcttctctgttctagcatctggagctgggtcccacacagcctctggcatggagtgcatggagccaccatggaagctcacatccagaccctggtgctaggtccctgcaagcaagccctgccccactgcctgcctgtctgggtgcttcctgggccaccctttctggctcagtgaacattgcctcctcctattgtccagggaacaggcagtgagactcccctggggctggccccttagactcctccgagtccgctgggttgtctttgcagggctgtgtcttttttaacatagtgacccaagtgatttcagcaagagtaggggccctggctgccaggctgagctgggaaagccacatcccagtgccagggttgggcagtcagggtggacagcaacagatgcaggatggagtgttttggtctcttcccagaggagtccccctcattgccctgaagtaacactcacttctctccatcaacaggtgactgaggaagtccaccggctgctgagaaggtgcccctaccactttgtgtgccgaggcaaagtcagtgtcaagggcaaaggcgagatgttgacatactttctagaaggcaggactgatggaaacggctcccaaatcaggtccctgggcttggatcggaaaatgtgtccatttgggagagctggccttcagggcagacgtccccccgtgtgccccatgcctggcgtctcagtcagggctgggctccctccacactccccaggccagtacctgccctctgcagcagctgggaaggaggcttagtggagcccacgtgggcctctggggtgcacatggggtgggaatgctccgggggtgacacaggccacggtggctccagccaggaccagccagaccagcagagcagggagccacttgccagggtggaggaggagcattgtccaggcatggcctgtggcccgagggccaaccaccgagcaggcacagcacagcagtgactcggtgaggggaggacacccgactgtgcacacttccaggcctccctggagaggtgtccactccatccttccctccgtggcgtagggagcactgtttctttccagcaagcctgttcaggtttggccaggtcggcatcaatgtaaggaccttcagagcatcccagggttacagcaagagccactgaggtgtggctggcagagcaactgaggagctctgcgagagtgtgccctctgagacagccctgtccgccccgcccaggtgggacctgacatacaggcggctccagccctgggcagcggcttcaagagccagagtgggaagtcaggcctctctgggaaggtcacaaggcctggggttgttcacaccacaggcacaatacagagctgtccactcttgaactggacggtctggggagaattgagaagctgcctctcactgcatggatagtggtggctgctggctttcaagcgtggttttttgctaagagccagaggcaggtcttctggagttctcaggggggccctgtgaccccctctccacaaccatggccagcatcggcttcttgctgcacctgtgcattctccacccctccgccaatggcttccagctcctaaaacacctggacattccccatcctgcaccggcactgtgtttgttcagagaaaacgaagggtgtcatttcttcttttccctgtggcatcgtggatcctttacatttagcaacaacagtgtgaggctccacttctgttgaatatgagcggctgtcacacccatgagcaagtttccttgatggaagatgctgtttctccggcagaaccaaccctccaggacgaagtttcagaattggctgatggtcgtgagtgcaggtgtccctgttgtaatttgcagggaaattgactgcaggtgatagtgttgacgtctgacgtctgacaacctcctatgtgcatgtctaaatagtcacaatgaagatgaaaataaggatgatggggacggggtccaggagggccactgggaaggcactatccagaaatagtggacagaggtctggcatgtggaaaccttggatctcggtcacagggaggaaggcagctagaaatgggagggaagcttctgggtaggcaccatagtaggggaatgtctaaagacccactgctctgagatgtggtcagagaggtttctgtggactgcagatgaggcctgagccctgcctatgctcaaagccagcagggttgggggtccgcctcctcactgctcctcaacagctgtaaccctttcctgagggccccgacttttcagaataggagcagagagaagcccagacttccttccctggagtgtagacctgtgtgtgggacctgctccaggctgatccctgtccgcacaggtgggtgatgtccttggctgctgccgtcagaggcagccccctgcacagggaggggctgatcctgcctcagctgtgtggccatgtgggggcagcaggggcctgggccatagctgggggaggccagaccctgagggctttgcagggcggccagtgcagtgatgcctggcgcttccagctgagacaggagtccggacagaggtgggcagggtggatggcttcgggcagggaaggcgggtagaggctgcatgtgggggcccctgtctgcctgtccttagggtgtggattaggctctggcttctgtgatggtgcaagaggcaggatggtctccagacaccttcttgcagagtgattttgaccaatgcctttccagcaccttcccctggttatgacagggagctcccaggccaggccacatgaccccacaggtaggctgaccccatggacccactggagactttgagggcagagctcgggcacctttcatcttccttgggtggtcctcatgtcgctgtccgctcatgttcctggtgttctggcatcaccttgtgccggtgggggctgggctcccgtgaggtcctagggcagaaggaggtgcttgcagggcctctcgctgctactgggacatccacaggacctaatgtttatgtggaatctccaggctgccatcgagggctcctgagctcatcctgaggacccagggtccatctgagctggctgtgggctgagatcctggctggggccctgctgtcaacctctcctccaggccctgccttgtccctgctcctgtgctttcctctcttcaggacaaatggtttgtccttatggtcccctttccactaggattttctcatcctcatctgtctatcccagccggatttaaagcagtcacttcagacaggagccacagggagcctgtgagggagtagtgcggtggtggtgagtgtggctgccctggctcccccagctcaccgtggtgctgtccttgacccacgagctgttgagaagggtgcagagcccctggcacagccaaccctgttgcccccagtgccgctgcccagcttcggccatccaggtggtgggtagacagaggagtgaaccccaaaggtgtccatgccccagttctaagccctgtggccaggtgctgtcacacagcaaaggggactttgcaggtggaattagggttagggatctaaggatgggaggggaacttggtttatctgggtgggctcagtgaccccttggaatggctgagggaggcaggagagcctggaaagattcgaagtgtcacagagatggtgccgtcattgctggcttaaagacaaggggccaggagccaacaccagaggccactccacaaccccagcgccagtcagcaaggaagccgggtgtcgctcacacaaccagaaggagctgagtttggcaacaacccaagtgagcctgaagcagattcgccccagagcctccaggcgtgagtggagcccagtccagcgacaccttggtttggcctgtgagactgagaagagagccagccacgccatgctgtgcctggggtccacagagccgggaggtcacacatgtacatcctggaagctgcccaaggtgtggccacttgtagggcagtgagaggaagccgtcgcggggaccatgctgccttctctgggctcacgactgttctggaaaggaccccatggcagacttggcaaggtctccacttcaggggcaaacatctccatcatcagcaactccaaaccccagccacttcctgggagttcaggaactgtgtttagccataatgtcccttggggtttggtgaaaaacaacttcctttttatttgtgggaaaactgtattatattgccttatttatttttaatcatgtacaatattcatgtacaaatgttagagccattcgggtaggattctctctaaattatttattgaagaggctttgtaaatagtgcaccagtgacaggtgctgcctgtttactcgtaccaaaaatgaagacaagccccacacccacctcagcccttgcttggccatgctgtggccctttggaaatgaccctgtgtgctcccctcgcgacccttgcatgcctttcatgcctgatgccgtagagtagaacacagccccggaatgcttccagttgcttgcaagggaccatgccggcccgggtggtccatgcctgcggggtgtctgtatcctgcaggaggacgcccctacagacccagcaacccaagttgccagcccgtgtttctcagactttaaagccaccagggcttctggaacacctgtcatagaagcaataactctaactctatactgtagagatgagtctggtccgaagcagattagtaatttagagataagccatgcatacaagtttgccccattctctggcttggggtggtgggaggcggggagctgccactcccaaagcctccaccccttcctgaagacccagctatgaaaccgcagttcctgtgggttgggctgcccaggctggtcagagctcagcaccccaggtctggtgagcagacagagccggcgttaaaccccgatcaggtcattgtcaccacacccttgcttggatgaggaaggaaggaggcaaaggcacccactccatccaagatccattccaattgatgagcctcagtactggcctcacactgaccaacggtggtatgctgcagtttgttggtttggtgcagagtctaaaggataacatatcaaggcttacctgtgataggccattttaaggaaatggtggcactctgaaggctgtccccattcaccttccacaatgctggtaccatcctggtagaagagccctctgaacaggacacctgttcaggcctgggggccccatgctaggcttgcctgggtgtgagaaggtcgaactgggtggcttaggccttcaaattgagcttgggggtgtccaagagaggggtcttattcgaggaactcacataccccaaataaccatcagtgcacaaatcattccatgctctttggcaccaggcaggagatgctgcaggcaggtgtccgtagttggcaaaaatgggcagtaggggaaatggagttgcttcaacctttctcagtcccggccctcactgcacccaccaagtcaagcagagctgggtgggctgagaccagcatcccagctggactgagcctggggggaggggctggagccaaggagcccccctgggtgggggcatcaggagcaggggcagggcctgaggactgctccccctgcatggagggcaggccaggatggagcccagggtagactttgaggaaggctcagtgggctcagcagaaggaaggctcttctcatagttgtggtttttcacagatggatttgggtgatctgagtgtggtcaggccctgccgttggggaatgaatgccacacggggtttgtctgtaagctgcagtgtctgtgattctgtgtgaactgacagcagggagctgaaggacaggccccggccttgggagaggacacgggcatgggctgctggatgcagggctcccagggctgtgaaggcagaggggtctctggaggcagacagggtgggctgggggccagcagcagggggcagagccccagccagggcagctgcttcctgcacatagacattcctcctgcgcagggccaagtgcccatgagcacagccccagacagacacggtggggagcttggagccctccgctcacctagaggagccctgggacacgcactggaaagtattmtaggggcttcctgccttatccttctgtttgttcatacacttagtgaaagcagatcctgtactaggatgtgaggatatctgtcacctgcgtggtccattccataaacaccagattccatttcagttgccacacattttggggctagacttccctaaacaacatgccattgtgaaataatgcatatatttgtatttttaaatttccctgaaaatttaatctattctgttccatatgaagtctgtttcactaccttaaaaaatagatactccactagaggctgtgcttaattcaaatccatgtgtgtgcctgcattacatgtgtgaacacgtgtttctgtygtgtgtgtcatgcacatctgtgtgttgcatagcataagccaaatgaaaatcatttgttcatgggattcatatgaggaacaaaattaaatttgaatacagtcagataactgccacgcagggcatttggggaaccatccccgaatgccctgatgtgatttccctcagaaaatccttgttattagaggagaaggtctgggcaggggcagcagcatctcagacatcaagtcaactttatcatctactacatcagcactgaagtccaggggcattgaggcactaactaggttccattttctttggtttggttacttattttttctttttgggttctcggtgtgcagaggctgtagagagagcctcagggcggtgaccgctgcaggaattcggccctccagctcccctccagttaccaggagccgatttggaggccaggccttcccagctgagtgtctgtcagcttcattctctctcagctgtgcagtggaagagcaacaacagacaggtgaccttcttgggttgtgcttcacaatggactgggaaaaacatctttgaaatcaggaaatcaggccgggcgcagtggctcatgcctgtaagcccagcactttgggaggcggaggcgggtggatccatygaggtcaggagctcaagaccagcctggtcaacatggtgaaaccccgtctctactaaaaatacaaaaaaaaaattagctgggcgtgttggcgggagcctgtagtcccagctacacgggaggctaaggtgggagaattgcttgaacccgggaggcggaggttgcagtgagctgagattgcaccattgcactccagcctgggcgacagagcaagactctctcaaaaaaaaaaaaaaaagaaagaaagaaatcagaaaatcgaccacagtggtagccacctggcctaatgctgtgtttttgtacctgacaggggtcactcattttaggcacaactccttcattctttgtgaaattagtgagtttccttctacccgtcaccagattcaatatgttctattaatacaccgataaccacaggggaagggcacttgtcgctctcccacctggttaccacagtctccatgggtcttttgccgtgaccacaaataaaggaaacactcatcactagtatctaagtcgggctttacagtaactatgcaccttctgtgtgcttcacctcactctctacttcaaacagcccatggagggaggtattattatactccttatgttgacagtgaagaatctgaggcccagagaggttggggacttgagtaaagtcacacagccctgagaggcaggaccagggttccattcctgctctatccagttccaagcccttgtgttttccattatgtttagtgcctctttgctaacagcaacatctgcaagatttgtgttggttttgatggagaactctagctcatccacatgctagtgcccaagtggtggaggggccacctcagcaggtgggttctgaatgcagccaaggctgtccccgcaatgggtgagactcgctccaactgcccgccctcagagcaggtgcctaagtcctccctggcactggcaggccttacctcacattgctaaattaaagcaatgcaattcctcttgggtaagaggaattcctccttctttactaactgatccccagcaaggaaataaaatgttaggctttaaaaatccctactttgtcatatcagactatattctaaaactatatttgagcgaaacctgtcattgcgtctaatttcaaatatacagaatctccttaagagctgttgccttatttttttgtaaagcctctctgacatcaaatggggagaaatggtggcacctccagacaccctgaaactacacaccatttcttccctgctcagcttctgctcaggagttctgtgagctatgggaaggccattggttgtatttgctacttttactttcatcttcctctgctgtagagccatttaatgttattgtcatatgctgctggtgaggtaaaggtgggtccgggtgccttcccaggggttagaggatgttcaaagggccgatttcagcaggagttcagagggcttatgatggatggtgagagatttgacaaccaccagagcacatgtgctctgaccctctcctgggcattggttcctgctggtaccgggcggttcagaccttcaaataggttgctttcaaaagagctttcaggcacttattgagaattaatgtttaaacagacataatagcctagatgaactcccaagagatctattaaatcttgtgggctgaataaatatctcgtgcaggactgtgcaacagtagcccagagcatcctgcctgtgggcatccacctcccaggtgagggcagtgggaagctggcccgacggcagccagaacttgtttctcacctcccaccagcaaccccccacccaactctgggccccaggcacacgaagcacaagtctcaggggaccattcccacattgggggatcctgagggagcccatcaccgcctcttgcatacaactgtccactaggaggcacgcccagtgtgggagagatgtatggtcttgccttccacctgtaaaaactgcacatatgcaagccatttgcactctggaactgcatgccgtgaaaactcctaatggtgtggaacttagtttgaatttgaaatcacgccgcatgcacaaagggacaggcccaggcccgacctcaggtcatccgcccgctggctgcagagcatccctgggagccaaggcgaggcccgtggagcctgagctttgtgtagctcgagctttgtgtagctcgtgcacttattatgcaccacctcccttcagtcaccactcctcttcctccgccatcctcatttatactgattgcacaccccccgctcaaacaacaatgtccttattatgatgaccatctcgtagtggtacattccattcctatttaaggtaagcccaaagcccacttttggattttctcgactgtccgagaaaagttgtgtaagcgcctgcgttcttctgggtttggctagatagggttgtgtccctctatggaatggagagtgatgtgggcaagggtgtcattttctcgcacaatacaactcactgaggatgcttctgtagaagtgagaaacacgatgagtacattcagaattacaataactcactctcactgggtaacttctcatgatagatttgtatgatcaatacgggtctatttttatgtcaactgaacactgtagggtaccttccagtctttttcaagattgttaaattgagacaagtaattgaataatttgtcctatttttattttaaaaaaagtgaatggactgaaatgttaaatgtgaatgtacatttcttaattgcaacttttctactgagtgtttgcactatactttctggaatcttatttaacaaaaataaagggaaaaaattgcttgactaaactctgtggccatttcagttgaaaaataaatggttatgtggatgttttgaagacattcctgcctgtttcacataacttctgggggaagttttattattcaaagtattaaatactacgtgaccccatttagactaaaccacacatgaactgttatccccccattacatactattcttcttcttcttctttcttttagacagagtctggctctgttgcccacgctggagtgcagtggcgcaatctcagctcactacaacctccgcgtcctgggttcaagccattctcctgcctcagcctcccaagtagctgggattacaggtgcatgccaccacgccaggctgatttttgtatgttcagtagagacggggtttcaccatgttggccaggctggtctggaactcctgagctcaggtgatccacctgcctcggcctcccaaagtgctgggattacaagtgggcccccgagcccagcccattatatgctattcctatccagtgttttcatcttgtgcctttttgaatctcacaattacattttagataatatttaaaatgtaatatagactctccattttactagcctttcttgtatcttagaatatcttgctgagacagtattgcttttttggtctctcagaagttactgtagctcaggatgcaatgataagttcattttacattcatctgtaaatactttatttcatttcctgtcttaaaagatgaaactgattacacgatcagttgataatttttttttaagtttgataatatcccattcaagtttagttgaatggtgaagatggcttccattgttgtcattgaagaatcttctgtctatcgagttgtttttcctttgtgtgttttcctggggttcttcaaagaaacagaaccaagagggcatgtgtgtgctgtcagaaagagagagggggcaaaaacaggacagagaatttattttaaggaattggcttacatgattgtggggctggcaagtctgaagtctataggaaaggccagcaggctagagccgcagggaggaggtaatgttgctacttgagttggaaggctgtctggaggcagaattccttcttcgtttgggatctcagtcttttttcaaaggccttcaactaattggataaggcccatccacattgtgacgggctatctgccttactcaaagtctactgatgacaaatgttcatcacatctaaaagataccttcaaagcaacatctactcacagggacatctgctgctgtgtttcaccaaacactgggacccatggcccagccaagcacatataacaaccatcatgagtggtctatagtttttctctgattgtctcttcaatttcagatgaaatcagttccttatagagagaagttaaaaaaatcattatgaagagagcaatagcccagtagaaaaatgttcaaaaagcacatacggaattataaccacctgaattcttcctgcctgctgcataaagaccatggcattatagtggagaaaaagtttaagagacccaaggctggtcatgccacatgggagacagagtttgttctggaatcatctcgtgctcacaggttagaggtttttcaaaggcagtctggcagaaggggtggggatggtgaggtaacagttacttgctgctgattgtatgaaatcacagggggggtcagagctgtcctctaggctgaatggcttctgggtggagccataggagcagggttggtgggtccaagtagagccatgagtgtcagacatgccaaaaaacctgaaaagatactctaagggccaatctacaataatggtgtgattgcaggggtaattggggaaggtgcatatcttataacctccagaataatggctgatactcgtttatgtctgcaccttagcaggatccgggctctcctccttgcccccagcctgatggcctcccattagctttacaaaagcagctgagttttgggggaggcctattatcatttaaagtataacttaactgtctctcggccaggcgtggtggctcatgcctgtagtcccagcactttgggaggctgaggtgggtggatcacctgagatcaggtgatggagaccagcctggccaacatggtgaaacactgtctctactaaaaatacaaaaaattagccgggcatggtggtgcaaacctgtaatcccagctactttggaggctgaggcagtagaatcacttgaacccaggagagagagattgcagtgagccaagattatgtcacagtagaaagaaaagaaaagaaaagggaaggaaggaaggaaggaaggaaggaaggaaggaaggaagggaaaagagaaagaaagagaaagaaaaagaaagaaagagaaagaaaaagaaagaaagaaaaagaaagaattttgtcccaggaagagggccggcctgatgtggttccagcaaactgacacaggccaaagtgtgcatgttacagagaagatcaggagggtgtcaggacttccaaacaccctggagcaaattctggaggcccagctgttgccattgatgtggcagatcccagcatacgaggagcaaaggagagatgaccttcttctggctctgagagtccataaccctttgaggaagattaagcaacaggcacattctcacatttatttaatctttaacacccctactggctaggtattgttaactgaatatcacagatgaaggacccaaggccagagaactaaaggctatgcctggcctaataccttttccactacagtgctccctgatggtggactttcatatcaaaaaagcacaaacagttacaagcagttacaagcagtagcagtaatagaagtaaaaatgatggcaataatgccatgcaatagaatgcttattatatgcccagctgggttctcagtgtttggcgtgtagcaactcagtgaatttctgcaacagcatcataaagtaagtactattattaattccatcttgcagattaagaaactaagtgtggctgagaatatagatggcagacatttctttcagatcttacaacttagaagggctctggataatttggaattgctagtacctgtgtctctttttctggaggcctttttctgatgccaggaaggtccgctgtacctgtttttaaggcaaagagaagtgccgagaccagctcagttggggagaccctaacccagtggtgctagaggaattaaagacacacacacagaaatatagaggtgtaaagtgggaaatcaggggtctcacagccttcagagctgagagccccgaacagagatttacccacttatttattaacagcaaaccagtcattagcattgtttctatagatattcaattaactaaaagtatcccttatgggaaatgaagggatggcctgaaataaaggggtggg

SEQ ID NO: 97085 - DNA, 37474 bp, Homo sapiens
gttttcagggtggccgtgaattaagtgattttattagctatctacaaagagaagctacaaacccccctgtaattcaagaagaaaaacccaagaagaagaagaaggcacaggaggatctctaaagcagtagccaaacaccactttgtaaaaggactcttccatcagagatgggaaaaccattggggaggactaggacccatatgggaattattacctctcagggccgagaggacagaatggatataatctgaatcctgttaaattttctctaaactgtttcttagctgcactgtttatggaaataccaggaccagtttatgtttgtggttttgggaaaaattatttgtgttgggggaaatgttgtgggggtggggttgagttgggggtattttctaattttttttgtacatttggaacagtgacaataaatgagacccctttaaactgtcttattttccaccagattgagaaccagatgttctctacacactatcactgttcaatagagctttcttcagtgatggaaatgctctgtaatctacactgttcagtacaggtagctacggagcatctgaaatatggctagaaactacatttttgttttgattaatttaaatagccatacagttgctaccatactggtcacggcagctgtagactgactgggtccatagttcatcacctcaaaattctttcaaaatttattatctctttctctccttacatgtttatttcccaggcctaccctggtgattagaacagctgaagggcctttcttgttaggctgtccatgccctaaggatgggttcctgtttatccttgccacgcagctgagcttactgcatgtttatatctcccaaggactgttctctgctcagaaatgccctgtcaagggtgtggcatcacgcagtttcatccaagttgtttcaggaattgctgacactgctgggtgcagttctatcccctaaagcctagggtgtggccctttaacttccccttcagtagaactgggaaaggcagtaccattcctagttatgagtgaagcatccactttcttttgtaacaatgaggaacagaaaggataagactgaagagtgatcttttgtccaactaaaccatttatctccttttgtaggtaaattcaaatcctgcccagttatagttttcagtcactggagaattccaggtaggagccctactttaggtgatcctaggaactcctatgttcagaaaagaattttcttcctactatataattacagtatttagctgtcaattttaagatgaatttggtagagccttatagtaaagtatgtatcttggtcacacacaaagcttggaaaaagtaaaagatgtctaaaccataatcttgtaactcataacatctgggctggggcccggggatctaattgtttagagagccccaaaagtggctcagatgtaaagccagggttaagaaccatctgccttggaagatttaagggaaacatataaacttgtacaaaggacacagaagcagtcagttttaattttttagccatgttggtaaaagttcattttcagtacatgggtaacacccaggccctttcccattatatccaggtatgctacaagttcttttaactcttatcagaagttattattactgtttccttagagaggctaccaggctaaaattcacttagtttggtttgtctaatgtcctcattattttatcctgaagatgatgtcatttctcaggacttgaaaatgacttggctgaactaaaggtaaaaaagccaagcctctgtcacttttcctagactcctaggcacagctatggagtctttgcacagtgcccataccctaaaaattaataatgaaaaccaaacctcaagaacctagagcagctctctacttgccaccatggactccagtggtcagcataagaaaagcagatagttgcattctatttagtttatagctgctttgttcctttgtgtttcactaagcagaggctcaaaaattcccttgataacttcagctgcccctgttcttttcctcaaactccaggatgagacctttaatgtgggacaatttctggtgaaggtactcacagcgacgcttttcttctctgtaacttgggtactgctgcagagaaaaagcatccatgtcaaaaagtaaaaattctcattctaccttgcttccgttcccagaccttgtcttaccttcctgaactttttatattcctggattatcttgtcttccaggacctgaaacagaaattactagcactgagttcaacattaagaaatgagagaggggcggccaggcatggtggctcacgcctgtaatcccagcactttgggcggctgaggcaggcagataacgaggtcaggagatcttgaccatcctggctaacacagtgaaacccgtctctactaaaaaaatacaaaaaaattagctgggcgtggtggcaggcgcttgtagtctcagctgctcgggaggctgcggcaggagaatggggcaggagaatggcgtgaacccgggaggcggagcttgcagtgagccaagatcacgctactgcactccagcctgggcaaccaagtgagactgtctcaaaaagaaaaaaaaaagagagaggggccaggcgcagtggctcacacctgtaatcccagcgctttgggagactgaggtgggtggatcacttgaagtcaggagttcaagaccagcctggccaacatggtaaaaccctgtctctactaaaaatacaaaaagtggctgggcatggtggcacatacctataatcccagctattcggaaagctgaggcatgagaatcgctttagcctaagaggtggaggttgcagcgagccaagattgcgccactgcactccagcttgagagacggagctagactgtccccccaaaaaaagaagggaagtaacttcccttctcattctaccaaatgatacagactaatttttcccttcaaacaggtttccttgtcactttgcttagtcactttataaacacaggtgtatggatggttagcagggggttaatggccagtagagctggaaagccaggctgggtcctgtccttaccttgtattctggagttcctcgccgaactcttttaatctctgctcccagctctatgaacctttggcttgcagtcccaacacgggcatgcaggatgcggtattcagcataatctgtctcaaagtcctgctcataggcatgttgctgttctgcactgtggatggccctgtattgcctgccaggagcagagagttgtcaccttcaatttcattgcccctgaaaagcccccagcttccaggaagtgtatcttaatatatgaacaagtcttgatgaaattggaaaaagcaaggaactcacaggaggtagtctggtatatcttcaggacttggggattcagaatctaggaaggaagcaagaaaacacaagtgattataagtcttttccactggcatttttaccctcctctcattaactcaccttcttgaactgaggaactgtgttctaatctggggtccatgtcctcatcttcttgctcccaatcttctccctcttgtaaatcctgattggtcaggccttgtagggggcttggcactaaaggcagagttctgaacctcttttcttccagttctacagtggctacaggcactgaacgtttctgttgaggaaaatatctgtgtgacataaacagccaagagcttcctaaatatgttcttctctcaagaatttctcctaggctgggcacagtggctcatacctgtaatcctgaccgtttcagaggctcaggtggggggatcgcttgagcccaagatttcaagactagtctgggtaacatagtgagaccctatctctacaaaaaaataaaaaaatgagcctggtgtagtggcacacaccagctgaggagggagaatcgagcctaggagttcaaggctgtggtgagccgtgatcataccacaacactccagcctgaggtgactgagtgagaataagaaaaaaaaaaaggatggcctgagcccaggagtctccagcctggggaacagagagaccttgtctctaaaaaaattcctcccatataacgagcttccaatttctaaattttagcttgactaaaagtgcttttcaaaatagtctttgccactgtttaattatattaatgttacaaaaaaaaagcccttgccattctaacttaccttgtccagacgtttccggctggcagaggaaggcagtgcctgaacaggttctctgtttggaacatgggtctggcttctaggatattttaagggaatgggacagatgaagaccagggtaggaggtggaactggatcttttattacaacatttaagagtggagattagaaaggaagacaatgccaaagcttcccatgttagtcccaccccatccaaagtacctcacttcccactgtgccatgtgctcccttgaggatcctgggagtgactgtccttggttgcttgccagtggatctgacactgacacctggtggggaaagtggcaggagcacttggttccctggagtactgggataccttggacttcaggctttgccccaccttatcacaactccctgcaatttctggcctcacccacctcctctagtgccatctgtggctgtgatactgcatctccttcagaatagcctcctgtgttctgccaactctcaggatgtctggcatcttcagtcaggttgtgtccctgaactgatgatggggctgggatagaatccatggctgcccaaataatgaggcgctccctgagtgagcccaggcagtggaggctgttaggcccagacctggaaaaggatggtggaaaaaaataggagggtggagagctcttaagcacctctccacatttccctcccccactttccacaaaccctttcttgccggctacctgttccccctcacctgaggaagcgttggcacacaaggtccaagctaccaccagcgccctcctgacaacactgggacactatgaaggagaagaggcaggaccaaccagggcctgggagtctcagatactgggggtggaaggagacggtaagccccatgaagtcagcccctccccctcctgccgccgccactcgtccgggagccagtccgtaagtaagactaagacgggtcccacagggcttgttagcacaccaggtgcagctgggcctgagttccccaggaggccgaaacagcacagtcccctcaaaccacagccccctgggacaaccccagcagcctcctcgccccacttggagttcagttatcggaactacctcagaccgtgactactcgcagcctccggccccgaccgcaccttccacctccagcccacgtttatgctccctcgccctcacctcgctcacacaccctgagctcgcacttacccctcggtggccttggaaagcaatcaccggccgtacctgcggggagagcgaagatgtgaccgttgagcgcaggtgaagcagtgtccccaggatccggcgtccggagcccgggatcacctgcctagcgggcttcacttggagaggtggggaggccagagcttgcggaagccgctccctctcccctgcaccttctccagggtcgccggctgaggcccaaggtccctaggggcagtgactagagaagaagggggccggccgtacctgttgccgctgacactcttgcagcgcccgcagggcagcgtcgttgagcctgagcagtaagaggctagtccgggcagcttgcgtgaagcagagccggagctgtcctctcagaggctcctggagctcctccatggcgacgagttcgagtgcaagcagcacgggggccacaggcgagggccaccaccgccacctcctctgttcagggtttggttggcacacccggtaacccacgtctgccccaccctccgccaggaacccgcccccggccccacctcccgccagcgccaccccaagctttcccagccgcgtgggcggcgcttcgctctccccggccaaccgcccggacctcggcgctttcttctaggatccgcatgaatcgctttgggctatcggaagagctatccccagttctcgggagaaagagtccgcgaccagcgtctgacctctcactcagagtccccagtcctgccttagtttccccagcgaccctgaatttggagttgctgtctctaagtgaaagctgaacctgcaaccccttgagggtttcagccgcagaggggcgggagaaagggcctggttggtaggcgggctcagcggttcgcgcccagttagccccgagcttcggagacccgagagaccagaggatggctgacacgaaggggcacccgagacagcgcctgggctttttcccgcccgcggttccaccgctctgaaaccgatttctaacagagaggtaattgggsccctgcggttgtggtggcagcagtgaaagttggctgtcaccgactggagcgcccccagttggtgggcagggatacgggcgcgggtagtggcaggaaagttgcagggcagagagccagaacccagtcctaggtctcacctcgtggcctaaacacgcgtcagagtggtgagaccgctccctgaggagggccaggagctgccatgaagtcgccaggcattccagagggccagatcctggtgcactgagaccccagcaccaacctctggccagcccttggtgtctccacttgttcctgtttgattatgtttcccaagagccccgatgttgtcctgtttcctaaacaggatccctctgttaaatccctggacctgcacaatccccgggaaccttaacgtcctctactacaaataaaattacctatacatttgtcaaaactcataaaaaaaaaatacatttttttttttttttttgagacgaagtcttgctctgtcgcccaggctggagtgcagtggcacgatctccgctcactgcaagccccgcctcctgggttcacgccattctcctgcctcagcctcccgagtaactgggactacgggcacccaccaccacgcctggctaatgttttgtatttttagtagagatggggtttcaccgtgttagccaggatggttttgatctcctgacctcgtgatccacccgcctcggcttcccaaagtgctgggattacagggatgagccaccgcgcccggctaatacacataaaatttgtatgtaaattatacttcaataaagttgatctttaaaatctgtgctatttctgtttctctgcggcaatatcctaatctgataaacagttgtggtaatggataaagctggtctcttagctgggcatggcggtgcatgcctgtagtcccagctactcaggaggctgaagcaggaggatcgcttgaatccatgaatcaggttgcagtgagccatgttttcgccactgaacttcagcctgagcaacagagagagaccctgtctcaaaaaaagaaaaaaaggccaggcgcgctggcagattccatctcaaaaaaaaaaaaaaaaaaaaaaaaaaaaaaaaaagaggctgggtgcggtagctcatgcctgtaatcccagcactttgggaggcygaggcaggtggattacctgagctcaggagttcgagaccacccagggcaacatggtgaaaccctgtctctactaaaactacaaaaaaattaaccaggtgtggtggcgcacacctgtagtcccagctacttgggaggctgaggcaggagaatcgcttgagccccaraggtgaatgttgcagtgagctgagatcacgccactccactccagcttaggctggagtgagactccatctcaaaaagaaacctgagttttgctgaatacggggacagagaaatgggagtcatggtggaggaaataggatcaagaaaaagttttaagatgggagaaatagcatgttccatgttgacggaaataatttttagaacatctccaaaattttgatggtgtaggagatttactgcagtagtgcccttgaataggtttgaggtcatgagatctattcaggattagctaaagcctaaaggtaggagtgtgggcagttcgtttatggtaacaggccacaggcagagaaggtgggtgtaagtgtagaggttaggtagatgtggtgggagtctgaaaatttttttctgattgcttccatttttctcagtgaagtaggaagcaactgagagagagratgagggaggagtgattggggttgaggtgtgaaaatagtgtgaaacagttgcctgtaagtgtgagagagtgaataagttaggaatgtgtcaaacactaaggactgatgataaatctgaggcttagagaagcagagattctaaacctaggcctacagatcatacaattcagggaatctgtgaacttggaagggaaaaaaaattacatatttatttatttatttatttttgaggcaggtgtccctcagttgcccaggctggagtgcagtggcacaatcatagttcactgcatcctcgaactcctggggtcaagcagtccacccacctcagcctccttcatagctgtaactacaggagcgtgccaccatacctagcaattttttaaattttttgtagagacaggatcttgccatgttgcccaggctggtctcaaactcctggcctcaagtgatcctcccacctcagcctcccaaagtgctgagatttacaggcatgagtctccatgctcagccaaaattacatctgtattttcactaacttttaacagaaatttagcatctcctttaattatgaatgtaggcaacaaatcactggtactggcagtaactgcaatgttattactaatagaaataacagatattttcattttacattacaagtgttgaagatacatctaaatattgtttgcattcagcacactttgtaattataattgatattagacttgctgttagatctttaatacattgataaaaatcagttacatcataaacattttaatattttgataattatatgtgaatataattgtttttctttatgaacccctgtgttttttgcaaatttaaaaaatgtttatttattttctttttttggaggccagagtttggctcttgtcaaccaggctggagtgcaatggtgcgatcttggctcactgcaagctctgcctcccaggttcacgccattctcctgcctcagcctcccgagtagctgagactacaggcgcccgccaccacgcccggctaattttttgtattttttttagtagagacggggtttcgccatgttagccaggatggtctcgatctcctgacctcgtgatccgcccacctcggcctcccaaagtgctgggattacaggcgtcagccaccgcgccctgcgatcttgactgtttttaagtgtatggttcagtagtgttaagtatcgcctatcctatcgccctgcagccaatctccaaagctctttatcttggaaaactgaaactctatatccatttaacaattcccgatttccccctcctcccagcccctagcaacaaccacccttctgccttctgtatctgtgaatttgactactgtagatacctcatacagtagtctacccttatcttcagggaagttccaaggccctcagtggatgcctgaaactgcagataatactgaacctgaataatgacaatcagaacatgtttctgttcatgtctcccatccacaaatgtaatgccttttctgtcttaattaagcacttaatgatgcactgtggccataacttttgcagtttgaggtgcaacagcaaaactggcatgagtttttctctctttttttcacaatttcacgaataggggagatttgttcttaccttaaatcttagctaactcagcataagattttttttttccttattgagaacttctaccttttcacttaaaggaagcacttgatggcttctctttggcaaaaccaaattggcagcaacactactcttgcattttgggctcattattaagtaaaataagggttgcttgcatataaacactgtgatacgctctgataactgagatggctactaagtgattagtgggtgggtgttgcctacagtgtggatacactggacaaaggaaggattgccatcctgggtgggatggagagggaggacacaagattttatcacactattcagaacagcactcaattgaaaagcttctgagttgttggccagccacggtggctcacgcctgtgatcccagcactttgggaggccgaggcaggtggaccatttgaggtcaggagttcgagaccagcctggccaacatagcgaaatcccatgtctactaaaaacacaaaaattagctgggagcggtgactaattttagtcccagctactcgggaggaggagacaggagaatcacttcaacccaggaggcagaggtttcagtgagctgagatagagcaaggtctgtctcaaaaacaaacaaaacaaacaaacaaacaaacaacaaaagaaaaacttattgtttatgtctgcatttttcctttttttttttttttttgagacaaggtctcactatgttacccaagctggagtgcaatggtacaatcccggctcactgaaacctctgcctactgggttcaagcgattctcctgcctcagcctcctgggactataggcatgccaccatgcctggctgatttttgtattttcaataaagatggggtttcaccatgttgcccaggctggtctcgaactcctggactcaagtgatccacctgcctcggcttctccaagtgctgggattacaggtgtgagccaccgcacctggtcctacttcttcttctttttttttttttgagacacagtttgctttgtcacccaggctggactgcagtggtgcgatctcagctcactgcaacctctgcctcccgggttcaagcaattctggtgcctcagcctcccgagtacctgggattacaggcacatgccactgtgccccgctaatttttgtatttttagtagagayggggtttcrccatgttgtccaggctggtcttgaactcctgacctcaggtgatccgcccgccttggcctcccatagtgctaggattacaagcgtgagccaccatgcccgaccctacttctatttttaaaatgaggatttaactctcatctgcccccaaaatatgcatgtactttctctctccatcctcctaatgtagtaatgttatttttgttatatcaatattgaatgtttctattattaggagtatgtaaatgttatttgcaagctgtgacacttaccatattatgttcacattttccttcttgtatgttcctctacaccaattaataattatgcattttttttgtttgcttagttacctatgtacttattaccaattcattctcataccctcttctaggagtataactctcctsttagtataaccaaatacaatcagataatttatcaattttatcagtttccattttttcttagatatatggctccagagccctccatactcctgctccaatctgaaatgattgttctctaggtcggctgcaaagctattatcctgggatctcccttctatctcagctggaggatttccttcacttacctcctgtgtcagatacactttttcctggatcctgtaacttttttcttggcttactccctcattttggtgcaaagcctcaaaggatttatccaccatgcattcttttcaggaagcttttggacaaatcctttgagactttgcatacctttattttattctcataacttttttttttcttttttttgagatggagtcttcgctctgtcaccaggctggagtgcagtggcgtgatctcggctcactgcaacctctgcctcctgggttcaagcaattctcgtgcctcagcctcctgagtagctgggattacaggcacgcaccaccacacctggcttttttttttttttttttgagacatagtctaactctgtcaccaggctgtagtrcagtggcacaatttcagctcactgcaatctccacctcccgggttcaagccactctcctgcctcagcctcccgagtagctgggattacaggcatacgccaccacactcagccaatttttatatttttagtagagacagggtttcaccacattggtcaggatggtctcaatctcctgacctcatgatccgcccagcttggcatcccaaagtgctgggattacaggcgtgagccaccatgcctggccaactttttttttgagacagtctcactctgttgcccaggctggagtgcagtggcatgatctcggctcactgcaacctctgccttctgggttcaagcaattcttgtgcctcagcctcttgagtagctgggactacaggcatgtgccaccacgcctggctaatttttgtatattcttttagtacagacggggcttcattatgttggctaggctggtctcgaactcctggcctcaagtgatccactggcctcggcctcccaaagtgctgggattacaggcatgagccaccaagcctggcttcataattttttttaagagacagaattttgccctgttgcccaggctggagtgcagtgacacaatcatagctcactgcagcctcaacctccttggctcaagcaatcctcccacctcagcctcccaagtagctgggactacaggcacacaccaccatatctggctaatttttttttttttgaaatggaatcttcctctgtcgtccaggctggagtgtggtgacgtgatcttggctcactgaaacctccacctctgggttcatgtgattctcctgtctcagctttctggagtagctgggactacaagcgggtgccaccacgcccagctatttttttttttttttttttttttttttttgtatttttagtagagacgaggtttcatcatgttggccaggctggtctcaaactcctgaccttgtgatccgcccaccttggcctcccaaagtgctgggattacaggtatcagccaccgcacctggccacatgtggctaatttttaaaagttttgtagagatgggtctccctacccaagctggtctcaaagtcttggtctcaagtgattctcttgacttggcctctcaaagtgttaggatttcaggcataaacaactgagtccagcctattctcttcaggtatttgataacattgccccattgtcttctcgtttccagtgttgctgctgacaagtctgtagccattctgattcttcatcctttgtatatgaactattttttatctcagaagccattaggatctttttaattctgacactctgatgtgtggtgatgtagagcttttctcatttcttgggttgggcactctgtgacctccctctatttttgttttatttatttattttaattaattaattcgtttgtttgtttggagatggtgtctcactctgtcacccaggctggagtgcagtggcgcgatctcggctcactgcaagctccgccttccgggttcacgccattctcctgcctcagcctcccgagtagctgggactacaggcacccgccactgcgcccagctaattttttgtatttttagtagagacagggtttcaccatggtctcgatctcctgacctcgtgatccgcctgcctcagcctcccaaagtgctgggattacaggtgtgagccaccgcgcccggccctaattaatttttttgagacggtgtctcactctgtcgcccaagttggagtgtaatgactgaatcttggctcactgcaacctccacctaccgggttcaagtgattctcccgcctcagcctcccaagtagctgggactataggcgcgcaccatcacgcttggctaatttttgtatttttagtaaagacaaggttttgccatgttggccaggctggtcttgaactcatgacctcaggtgatccgctcacatcagcctcccaaagtgctgggattacaggcgtgagccactgtgctctgccattatttatttatttattactttttttttttttttagacagagtctcactctgctgcccaggctggagtgcagtggagcaatctcggctcactgaaacctccatctcctaggttcaagctattctcctgcttcagcctcccaagtagttgggattacaggcgcccaccaccacacccggctaatttttgtatttttagtagagatgaggtttcaccatgttggccaggcgggtcaccaactcctggcctcaaatgatccacctgcctcagcctcccaaagtgctgggattacaggcgtgatccaccgcgccccgcctgaatgtttctttctttcttttattttttccttttttttagagacatagtcttgctctgttacccatgctggagtacggtggcgagatcacgactcactacaactttgaattcctggattcaagcaatcctcccatctcagcctcctgagtagctaaggactacaggtgcgtaccaccactcctggctgttttctgaatatctgtttttataaactccctattgttgttcaataccctctctcaaagaatactatttatagtcctgtgtctccgattttcttgtgatcttgcaactgaattgtttctgtatcctctgggactgaattttctttttctttttttttttttttttttgagacagatacttgctctgtcacccaggctagagttcagtggcttgatctcagctcattgcaacctccgcctcctgggttcaagcaattcttgcgcctcagcctcccaagtagctggaattacagatgcatgccaccacgccccactaatttttgtatttttagtagggactgggtttcaccatgttggccaggctggtcttgtactcctgacctcaagtgatctgcccgtctcggcctcccaaagtgctgggattataggcatgagccaccatgcccagccatgagactgaattttctgcttgtgtttttttggggtctatttttatgttaggactgttttctccaacgcttggtgatctttggctctatattcatctctacaagcaaggcactaaaaagctggttgaaggccagacacagcggctcacgcctgtaatcccagcactttgggaggctgaggcaggcagatcatgaggtcaggaggtcgagaccatcctgactaacacggtgaaaccctgtctctactaaaaatacaaaaaattagccaggtgtggtggcgggtgcctgtagtcccagctacttgggaggctgaggcaggagaatggtatgagcccaggaggcggagcttgcagtgagccgagattatgccactgcactccagcctggaccacagagcaagactctgtctcaaaaaaaaaaaaaaaaaaaagctggttgacgtttggtacgcatggaaagagctgcctacactttaagataatctgactggaccatttcattatgtaaggcctaagttcatctaattatccaagcttatccccctctcagggccttggtatatgctgtttctcttgtgtgtgtttgattaaaagtatttggctgaagtgacagaaatctgactcaaggtagcttaaaccaacaaaacaatatggtagttcccacaccaggaaactcaatgtagaacaaatgttacagttgaggtatccagtggtccaacagcatgaccaagaaccaagattctttctgctactcatttgcttcaacctaaggctggctctcttctaggtgatagactagagctgccaggagcagtatgggctatgtgtttcctcattcatgtcaacgggaaacagcattgtcaccaccctagcaatggaaaaaaagtccttctctttggtctgatcaggctaatttaggccacatgctcactcctgaaccaataactgttaccaggtgaataccacaaaataatctgcttaggcctgggttcgtttttttgtttttttttttttgagatggagtctgctctgtggcccaggctggagtgcagtggcgctccactcggcttactgcaacctccgcctcctgggttcacgccattctcctgcctcagcctcccaggtagctgggactacaggcgcctgcaaccacgcctggctaattttttgtatttttagtagagacggggtttcaccgtgttagccaggatggtcttgatctcctgacctcatgatcagcccgcctcggcctcccaaagtgctgggattacaggcrtgagccaccacgcccggccaggcctgggttcttaaaccaatcaatattaaaagggattagtttactttgattgacttagccattcagtaccactcttggagtataggctggaggggaagaatttttttattttttgagacagagtttcactcttgctgcccaggctggaatgcaatggtgcgatttccgctcaccrcaacctctgcctcccgggttcaagtgattctcctgcctcagactcccgagtatctgggattgcgggcatgcgccgccatgccaggctaattttgtatttttagtagagacgggggttttaccatgttggtcaggctggtcttgaacccctgacctcaggtggtctgcccacctcagcctcccaaaatgctgggattataggcgtgagccaccttgcccagccagaatttttttttttttttgagacagggtcttgctctgttgcccaggctggagtgctgtggcatgattacagctcactgcagtgtcaacctcctgagctcaagccatccttccacctcacaccctcgagtagctgggactataggcacacaccaccacacctggctagatttttagtttttttttttttttttttgagatggtatctcactctatcacccaggctggagtgcagtggtgcaatcatggctcactgcaacctcctcctcccaggtgcaagcaattctctagcctcagcctctcgagtagctgggattacaaggtatgtgcaccatgcctggctaatttttgtatttttagtagagatgggttttcaccatgttggccagactggtcttgaactcctgacctcaagagatctgcctgcctaggcctcccaaagtgctgggattacaggcatgagccaccacgttcagcctaatttttaaattttttgtagagacggggtctcactatattgcctaagcttgtctcagactcctggcctcaagggatcctccctgtcggcttcccaaagtgctgagattacaggcatgagccaccatgcccaacctggagacagggtttcactgtgttatccaggatggtcttgatctcctgacctcgtgatcggcccgcctcggtctcccaaagtgctgggattacaggcgtgagccactgtgcccagccttcaaccagctttttagtgccttgcttgtagagaaccacttctgaggtaatatttatttatttgtttgttttttgagacagggtctcattctgtcacccaggctggagtgcagtggcgtgatcatagctcactgcaccctccatgaggtaacatttaaactgagacctagagcctgttgcctgtgatagtctcctgactggtctcctcatttctattcatctgctgtaatccattctctactggtaaagtgatcttttcaaagcttacactatgctaatgaagagcacaggctgggttagactctcagctccaccccttattatctcagtttcgttgagaaagttatttaacctgccagggccgaggtttctaaatcagtaggagggggataatgacacctccaaaggtcatcgtaaggctcaaataagaaaagtacactagggccgggcgcggtggctcacgcctgtaatcccagcactttgggaggctgaggtgggcggatcacaaggtcaggagatcgagaccatcctggctaacacggtgtaaccccgtctctaccaaaaacacaaaaaattagccgggcgtagtggcgggcgcctgtagtcccagctacttgggaggctgagccaggagaatggcgtgaacccgggaggcggagcttgcagtgagccgagatggcgccactgcactccagcctgggcgacagagtgagactctgtctaaaaaaaaaaaaaaaagaaaagtacactaaatgtaccaaataaaaacccacctgatgttagctagtagttatattagcagtagtaacttggatcttgtcacaaccctacctccctatctgacctagtttcacaccaccctgctcattaggcattagtgacttgccctttacctacacaataatcctgtggctcttgatgggatgacctgagggaggagggccttagggccttcacacgtgctgttccctcctgaaatgttctccctgcccttccctcctgggcttggctaatttctcatctttttgctttagctcaaatatcacttacttcacctccctaatcaaaattaaagtctacagagtccacaggtgtactcccttcatagcaccagcagtactatttagttacttcataccaggtggaattgttcacagagtcttcattcaaattacactgacatctgtttttatgggtcagtgcttaagctgtgtgcactgcgaaacattttgaatatcatccttgcgtggaatctgttattttcctttaaagctattatcatgatcagttttcatatataggctgggcatggtggttcaagcctgtaatcccagcactttgggaggctggggtgggtagatcacttgaggtcaggagttcgagaccagcctggccaacatggtgaaaccctgtctctactaaaaaaaaatacagtccgagcacagtggcttgcacctgttatccmagcactgtgggaggccgaggcaggtggatcacctgaggtcaggagtttgagaccagcctgaccaacatggttaaagcctgtctctactaaaaaatacaaaaattagccgagcgtggtggcacgcacctgtaggcccagctactcgggaagctgaggcaggagaattgcttgaacctgggaggtggaggttgcagtgagccgaaatcgcaccactgtactccaacctgggcgacagagcaagactccatctcaaaaaaaaaaaaaaaaaattatccgggcgtggtggcgggtgcctgtaatcccagctactcgggaggctgagaaaggagaatcgcttgaatccaagatggtggaggttgcagtgagccgagagcataccactccagcctccagcctgggtaacagagtaagactgtctcaaaaaaaaccaaaaattcatatatatagacagacatataaatacatatatggatattagagagagagaggcagacagggagagggagagagagaaagtgtgagagagcttttttctctgtatctttcatgattataggaatatgctgtgctcatcaagatatacccaattgtggctgtgcaccgtggctcacacctgtaatccttgcactttggggggccaaggagggcggatcacctgaggtcaggagttccagaccagcctagccaacatgatggaatcccatctccagaaaaacaaaaatacaaaaattagccgggcatgatggcgggtgcctgtaatcgcagctacttgggaggctgargtgggagaatagcttgaacacaggaagcagaggttgcagtgagccgagatcacgccaatgcactccagcttgggtgtctcttattaactgtttatttattatttattttgagatggagtctggctctgtcgcccaggctggagggcagtggcgtgatctcggctcactgcaagctgctgctcctgggttcacacggttctccggcctcagcctctcaagtagctgggactacaggcgcctgccaccacacccagctattttttttttttgtatttttagtagagacggggttttaccgtgttagccaggatggtctcgatgtcctgacctcgtgatccacccgcctctgcctcccaaagtgctgggattacaggcgtgagccaccttgcccagcctttcttattaactcttttttttttgagatgcagtctcgctctgtcgcccaggctagagtgcagtggtgcgatctcggctcactgcaagctccatctaccgggttcacgccattctcctgcctcagcctcctgagtagctgggactacaggcgcccgccaccacgcccggctaattcttattaactttttttttagacgggatctcgcactgtcgcctgggctggagtgcaatggcgcgatctcggctcactgcaacttccgcctcccgggttcaagcgattctcctgcctcagcctcccaagtagctggaattacaggcgcgccaccacgcccggctaattttttgtatttttagggttttcaccattgttggtcaggctgctggtctcgaactcctgaccttctgatctgcccacctcagcctcccaaagtgctgggattacaggcgtgagccaccacgcccggccctccagggtcttaatacaaaaccgggtggctggtggcgatggtacagtaagaaaagctccagaggggaaaagcgaatatgtgaattatctaatctcagccactgatccaactccatagtctgtgacttttggagtcctccaatacttccaagctgcatgttcacatttaaagtttctgggggaaaacgaacagggtagagttttaggaaataccagatgttgctgcgattttctacagtgaaggggcgtggaaggggacaatgggagtagaagcgggtttctgaagttgtgtttgtacttgattttaagcgagctgtgaacaactcgtgtccaaataagtggctgagaggtggtcctaagtaagcacaagtttagtagtagagtactcgtaacacagaactggctgaaaccccgccctcttgtctacgggcgttctttcagggcgactttgtcagtaccccaaactgtccccgcatgaggtcactctgcacggtcacgtgctcgagcccgcgggagcgccacatcgccagccgcacccctccacccccaacctgcccacgtgacccggcctagtttctccaggcccgtccctacgtctcactcgggaagccccgccccacgctgagcgctccgcctgcgaccctccgccacttacccaccccggctcaagcacgacccgtggatccacgtgctttttcttgtccaatgggagccggctcccgggcgcgaaggggcggggaggaaaggaacgactgtgctacgttgccagaaggggcgggacctgcaacgtccgacagaacgaggggacgtaacggaggcaggttggagccgctgccgtcgccatgacccgtgagcaccgagcccccttctccttgcccttttctttccgttcaccctaaacaccaccggcgaggcgccggctttgaccttccgtagcttccctagcaaggcgtttctctgggcgcgctctgtrgccaccctcacactcggtgcccggaaatcgagccctttgcccacggctacttcacgggaccaccctcccgggttaggcataggccctcccggatcttccgcggtgtaaggagaaggccagcgcccctgtgataggcccagagcccccactccacaagccagcccatcccccacggagacccaaaccgtccacacacaccttgccagctgtttgggccccacgccgccccaaaacacgcctccagctggccccttgggacctcccttctctagtccgtattttgacctggcccgtggcagattcgccactcccccctaccccaagcagcctgggcctcgatgggccgttgtcggggcccggagattgaagtggtgttggatcctgctgctggccgcgctggggtagaagggtcgccggtgtgtgggcagagcggcccccgcgtctcacctttaattttctttccttaggcggtaaccagcgtgagctcgcccgccagaagaatatgaaaaagcagagcgwctcggttaagggaaagcgccgagatgacgggctttctgctgccgcccgcaagcagaggtagccccagggaggggagggaaagggacggtggagacctgggttagaccaagggttatagaaggaaagagagctacctcagggcttgaatgtggactagtcgtgaggagcagagtgcattgcttcctctagggttttatttcctccccaccctccaaattgttagctcacagccttacaggaaaggacgggggcgggcgcctgccctcagtctgatttctgagcgtccctgggtctgaccttaagggcaagggcagggagcttcacatttcaaatacagttgtggttacggcagcccagtacttttggccctccttgctgttcggttctcctcccttctcccaacctcctcactggtgttgctgggtgtggtcctcaatacagaatagagacccttgggcctgtgtcaccagacttctgaccccttgggcaacagccagatggagactggtcgccttttgagcctcagctctcttcctcttgttctcctagggtgggagtacagcagccaaacgctgaacttagtcccatccacttccatcttatcctttgtgcccttcatccccctgcatcttgtcctttttgccctctggtacctcccagtgccccatcatctctacccccagggactcggagatcatgcagcagaagcagaaaaaggcaaacgagaagaaggaggaacccaagtagctttgtggcttcgtgtccaaccctcttgcccttcgcctgtgtgcctggagccagtcccaccacgytcgcktttcctcctgtagtgctcacaggtcccagcaccgatggcattccctttgccctgagtctgcagcgggtcccttttgtgcttccttcccctcaggtagcctctctccccctgggccactcccgggggtgagggggttaccccttcccagtgttttttattcctgtggggctcaccccaaagtattaaaagtagctttgtaawwmcttgagcgcctggtttgactggggacttggggggatggggttggaagaatgactgccctttcccaccaaaaaagggagaactctttagattcagattgtgggtatgtagacttaataagtgaaacatcacagaagaagcctttattatacaatgacaaccaaacaagtactccggatatgcagtagaggaatcctctaagaaccatagagacttcttttctgtgatttttgttccccacccttgaacaccatctctaggatggagttggcctaagagtgaatgctgcaagatctgtgtttatgcctcttttcctcattcttcctcagtttgttcgtctgcttgaaagttggccaaaaaatcctgctgctcaccgacttcccgtggtcagctgctgtcaagcgttcactttctcttctgtcattcctcatggaatgagggtggttttgtcttcccgcttcccttgacctcaaaatcaggattaaaacctggggtagcctctgtgctcctttcttctatgccctggtttgttctgtggttctgggcttcttatatccgtgtgcccagggctgaactccttattttcctttctccaagggcagagccgagtcttcagtccctgttggtctttccccacccccacttccagcccaagagccaggaaagggctggtgccacactgtctgctgggatcagcggtggttctttgagctgctgatttgggtgttaggctcttgagctgggatgcagatgtaacagtagctccagtgagtcagacactctgcccagcacattagactgtgtttgaccacttcttccagttcatagtattgacttcagcccaaacggagataactccctgtgtgtccttgaggtattgagctgggctggacagctccccttgagccaactctaggagtacaatgtcaggggaaycccagtttgtgaaaaggacttagactggaggatatttgttatctggggatatgatgcggtggcggcggcgcctcaagataaggggctggggtttctgggtggggggccaacagagtggtgccagtaacagccccagatagaggagtacgcaggcccagcatgaggcaaccttgacccagaaggtggcccagctacccttgatgaaggtcttttccagttctgctccctcatagctgtgtaaccaaaggctctggttagagaatatgaagggccttagcttttagacctgttctacctcctcaccaaatataatggcagacccatgtgtgtctggaatggccttgaattgctctttccttaaaatagctagctcttcaggagagtatctaaggcccactccatcttacctgaaccagttggtaagggtaaccatgacatagagtgaggcaaggaagaagacgaagtggaaggcagaatagttgtaggaaagatgctggacttggactggaggagctggaggggtttcttggtcagctggcctcgcagccccacccctttgccctggagagaggaaatggctgctgggagcagagctgctgaaacacctcttcccctctcccccaactacctttgttaaggctcttgagggttcttatggcactccacagagatctaccacttcttatggttcctcacttggcactcacctttgtctgcctccactgtttcagggcagcagaaacacagtgagggcttctgcaaaacagaacgcaggttttggaatggtcttaaaagatgtgagggtgttaatctaggaaacttcccccgtgaaaagattggtctagtattaaaaagtggaggcacacctgggttcaaattctagctccagcatataagtggctgtgcagactttggtaagatgtttaatcttttgtgcctcgatttctccatttgtaaaatggagcaaatacctacctcacagggttgttgtgagggttaaattaaatgagattatgtaaaagtatctagcacagttgcctagcacattgtgggtactcaataaaaggtaacagcagctataatctgagcattctgggtagaggttggtaggatgtgtgtgtgtctttgtgtgggggagggagggtgttggggatatggagctctttatcctcacctgaaactcatagctgtaaaccttgacaatccacaggggtccaaatacctcagccaggtaggaggcctcattgctgagaaagaatagagttcttaagctggtttagttaaatagggattatctgggggcatttactaccaattggtccatactggtaatcctcaaaagggtaccatactccctgtgcccttttccaccaaagatttagaattctattcatgtgagagccctaaggtctttggacatattttaaattctcaagtcattccccccacccccttcatctcatacagatcatctgacaaagtactattcttagaatttgtccctgtttgtggggagcttttctcactctagtcttgctctaaactttaaataatggtcccagacattgtcctgaccatccttccctgtcttgggcaccctcctttcatacctccacccttgacacctttacgcaccaagcaaaaagcacacaagcatacatgatgctagcactcagcattgctagagagatatctggtgtttggggttccattttactcaggccaggcaggcacagggtgtgattctgtccttgaaggattactgggaagggacaacagaagagatgggtattaacaatgagctaggtatttggcaggggcaaaaaaaggtcttagcatggagaatccaggtcctgtcccttacctctctctggaggacggctggacagtgcagagaaagtcagatacatgatatagcagctgatgacagaagcttgtaggaggccagagcggggttgctctggggagtaagtataattgctttagtctacaggctggtaatttcctccatttctacccccacttgtacttctgtctccccatsctttggtggggatagggaagcagagattcttttatcaaataattgagattagggaggtaatgaaacttgctatgcttttaaggcccccaaaacctggaatgctgtaggacatgtacccactgaggcggatgcaaggagcgatggagaggaaggagatgaggccacagaagcaaaggtgcagactgaggagcatcttgttaagcaggcagccagctgggtgtgtataatagtggaataggagcacagctcccacacctgccatgctgtagaatcctagggtggccagcaggacagccaggaaccagctacagtcttgagctgcacctgtctgcctaagggtggaaagtgggcaatggcttggagctccagcattttttttttttttgagttgggagtcttgctctgttgcccaggctggagtgcaatggtgtggtctcagctcactgcaacctccgcctcttgggttcaagtgattctcctacctcagcctcctgagtagctgggattacaggcacctaccaycatgtccagctaacttttatatttttactagagatggggtttcaccatgttggccaggctggtctcaaactcctgacctcatgatccacccacctcggcctcccaaagtgctgggattacaggcatgagccaccgtgcccagctggagctccaactcttttacccattaccaactactcccctgctctcagaagactggtgtgactagccatcctacttggcccacgcagtcatcacattcctaagcttttttgatactgctcagtgggaagctgtgggaccagtgctctgccgtgccttttgcccagccctttccatgtagtaatactagaaacctccccaggaaaagcctttagggttatgtgccccttaccagttcttgttccaggaatgggcaaaagctgtaataagcaccaactgcagtaggatgaatgcaaagcctccacagatgccaatgtaatgccatgctgcaagatgggcaccagtggaaaaatgtcaaattgttacttttttttttttttgagacagagtcttgctctgtcacccaggctagagtgcagtggtgtgatttcagctcactgcaacctctgcctcccgggttcaagtgattcttctgcctccacctcctgagcagctgggattacaggtgcgtgccaccatgcccggctaatattttgtatttttagtagagatggggtttcaccatgttagccaggattgtcttgatctcttgacctcgygatccgcccgcctcagcctcccaaagtgctgggattacaggcgtgagccactgcacccggccattactcctcttcttacccacttgttatcttagaaaacttagcctactcctgccaagagtgtgggagggagagtacctgggaagagatgctcatcaggaatgcagaaggcaatagcacagagacctaacaggaacagcagcttgaggagccagaagctggttaggagggagaaagaaaaacagactcaggagaaaaggcaaaggacagtgaagagtgcctatggggaaaggcaaaagagaaaccaaaaatayaggaaagaggacagacgagacaactaaggaggaaccaatcccaaatgagagggggytgggacaggcctactgcaccttattccaaattctaactcaaagatacttaatagcatytgggcaatgttttacagtttataaaggattgtgttaccaagataaccccactgttacctccattttagatgctagaagcacaaagtctggctcaaggttacacagcaagtacacgagaagcagggacttaaacctgttttctgtctttttacagtgctattacttcatcccggaatttcctttacccagcctatgtctactttccytcctctgtcccctccccacccagaaagtacacacaaacctattatgcagctgtgcccgcgggctggtgggggagtggaggtggaccagcaacacagcctgcagcaggtggaaggtggcggttcctgcacatactcggtacacagccccagagccactgagcactggacagtcagagaggccaaacaggtgggcacacaaccccgagggcatctggatctgggagtgtgtgtgwgagaaatggcaggacaagtcataatgcatggaaargtacctacttgtcacgggtatgaccactcatttgtctcctgcccccaaccgaaaccttttctatcttagggtttttccttttatctcttcccacctgacaacccgaccccctctcacttaccctgtgtgtcttgccccacaccctttccactactgtccttgacagcaggaggcagcagattgctgaggcccccacatggaggaggatgtagaacaggcggctgcaagtggatgcggtgagagagggccacctagagtggcagcagctggcacaaggagcaggcccacagcagcacacctgggagtagagcagatgcaaggcagcgaggtggagacttgctgaggaaaggcatacgttaatgtatgtgtgaggttaacccaggaggttgaattccaaaatttccccttcccctttcttccttttactcaggttctgtttcaagctgattccagccatttgggattgccgcccactgacaacttagtagggctttcattataagcaggcttgagatatctgacctttctctcgacctaaacacctggggctggaaacatggcgggagagatttayagattatacctggggcaacgaaccagaacgacattagaggagaaaagaggcctgtcgtttttattggcttctgcacgtcttcctccccagcttcggccactctccycttcgcaccctctcacctgacagaagggacttttcactaggacactgctgcctccgctgtgctgctgtgccaggcccagggaggtgccggggctggggccggccttggcacccaccatccttgtcccagggattaggcttaggtccaccagatggaaggcagatgagagcagcagttgcttctgtcctcagcccattggactgccactgtgttggggctgagcacccggtcccgggcagaatggagacgtccggaagagaacactgacctccaggttgcggtaaatgcaaatgccctgtgaaggagctttgtccttagggcctcaacactgcggccactcaggctgttctctccagattagggggcagtttgtctatctggccccctgtggattagcattctttattggtttaggattagacgtcattcaggttgaacggagttccctgaggtgggtgggtgcgtgtttatgtgttgaggggactattcctagtttatgaggtggttaaggatatcggtggggtgggctggagcggtgtcgggttrggtctgagagaaggcctcgcacaaaacactgtacaaacccgaaaggaagtctgagagacgaaccgccttcctccctgaagcttctagaactggagcagaaagaaggtgtggcccagggccagccccgcctcctccccgggcggaagctgtgtcagttgccggaagtcggcgtgaggtggggcttatgcggcggcgtggtgaaatagatatggcgaccgagggrgatgtggagctggagttggagactgagaccagtggaccagagcggcctccggagaagccacggaaacatgacagcggtgcggcggacttggagcgggtcaccgactatgcagaggagaaggagatccagagttccaatctggagacggtaaggttggccaagagcatgtcggggcgggctgagagcagaggggggctctgaggctgtagctggaagccagcgctccaagacggggttctgatcccgttggcaggaggaggcaatagggtagagccgagggaaacagcggtcaccggagcgcgccgcttgcctaaaggagcttgatagtgggcttaaggggacctcaggtgcatagaatggaattaaacatagtccttgctacctggtaacacttgtcatcgtgaatccatgcatgaaccgcttgttttgttggccttttagattattgggaattgtgggtagcggtgcagtaactagacctgcctttcccataggccatgtctgtgattggagacagaaggtcccgggagcagaaagccaaacaggagcggtaagtcttcaggggcagccaacttyaacagttcttccctccccggtccccagacaaaaataaaaaccattattaagcctttataccgttcttcaaatttatcaccaattcctgcagatctaggcgccacaactttactcttgttagcagaaggcctcctggcaacacctgctgccaagactccaggggaaaggagtattagtgggagtttttattttcaatcaagggtttatcaagatttatttacagggcacttctgggaatgacccttcctgggagtttatggtgttggttgagaatgaggactaatatatttaaatatttttgcagggagaaagaactggcaaaagtcactatcaagaaggaagatctggagctaatagtgagtggtagtgcctaactagtgtatgcggaggggaggctattctgcttaatttgggttgtttcctgaaacaagcggagtcagtatatttggtggcacattaatgcctgggaacctatgtaacatgatttttttctgcagatgactgagatggagatayctcgagcagcagcagaacgcagtttgcgggaacacatgggcaacgtggtagaggcgcktattgccctaaccaactgatgcgtgctttctcaaatatacctactggattaatttatggcaataaaatttttttttgtctttttcagttttatcatcttgggtcaagtagagtgtatactatatcctatgttgtggagaatttatatgttggagactaactgaatttaagtgacccattaaaatctagcacacctgtatgaaaaatcagtgtagaagaatacctcatgtgcagatgctaggtggcaggccagtctcattcatctgactagctctcaacagtattcaaggtacatctggagtctcagcagagttactgtactcaaatggcatgtgtctccaagacagcttatgaatatctaaaaggccagctacctgcctaggagccactatatatatagatagatgtaggttatgaacccagttcataggccaccttgagttagaattttggtacctacaacatgcttgattttgagtgattaaaaaaaaataatttggctgggtgctgtggctcacrcctctaatcccagcactttgggaggtcgaggcaggtagatcacgaggtcaggaattcaagaccagcctggccaacatgtgaaaccccgtctccactgaaaatagaaaaattagctgggcatggtggtgggcgcctataatcccagctattctggaggctgaggcaggaatcgcttgaaattggaaagcagaggttgcagtgagctgagatcacactactgtactactgtactccagcctgggggaaagagtgaaactccatctcaaaaaaaaaaaaaaaaaaaaaagcccgggcacagtggctcacacctgtaatcccagcactttgggaggctgaggcagtcggatcatgaggtcaggagttgaagacaagcctggccaacatggtgaaaccctgtctctactaaaaatacaaaaaaaataaaattagccaggcgtggtggtgcatgcctgtagtcccagctactcaggaggctgaagcagaagaattgcttgaaccagggaggcggaagttgcagtgagctgagattgtgccactgtactccagcctgggtgacagagcgagactgtctcaaaaacaaaacaacaaaaaagaatttaggggccaggcatggtggctcatgcctgtaatcccaacaccttgggaagctgaggcaagacgatcacttgagcccagcagtttgagaccagcttgggcaacacagtgagatttcgtctctaccgcgctccccccaccaccaaaaaaagaatttaggtacctgagggttagaacatggtaagactagaagatatcaaaggttgggccaggtgtggtgactcatgcctgtaaccccagcactttggggaggctgggctgggaggactgtgtcaggtcaggatttccagaccagcctgggcaacatagcatgaccttgtctctactaaaattaaaaaaaaaaaaagccaggcatggtggcatgtgcctgtctgtggtcccagatactctggaggctgagatggatttgcttgagcctgggaggttgaggctgcagtgagctgagattgtgctactgcactccagcctgggcgacagagcaagactgtctcaaaacgaaaaaaacctatgaaaggttttgattggtattcaaattctaagccataatacattctacatgccatttcctatcctagagagaaggtaattttactttaaaggttaatcagggccgggcgtggtggcgcatgcctataatcccagcactctgggaggccgaggcaggtggatcacctgggatcaggagtttgagacgagcctggccaaaatggtgaaaccccatctctactaaaagtacaaaaaaaaattagctgggtgtggtggtggacgcctgtaattccagctactagggaggctgaggcaggagaatctcttgaacccaggaggttgcagtgagcagagatcgcgccactgcactccagactgggcaacaagagtgaaactccatctcaaaaaaaaaaaaaaaaaaatcagcttggaccaactcacacatgttgaactagtttcctcaactataaaactgtgatggccccagctaggcacagtggctcaacgcctgtaatctcagcactttgggaggctgaggcgggcggatcgcgaagtgaagatcaagaccatcctggctaacatggtgaaaccccgtctctactaaaaatacaaaaattagccaggcatggtggcaggcgcctgtagtcccagctactcgggaggctgaggcactctagcctgggcaacagagccgtctctttaaaacaaacaaacaaacaaaaaaaaaaccctgcaacggcccctgagtctgctgtaaggacactcaaatggcaattacagacatttctccaagagtttcaaggccttaccctcattctgactctaggataattcttagattgtatcccacacaacagtgacttgtacctgtgttcatctttatgtatttaccacctcatagtaattatttgcattcatttttatcgtacgacactaaactatttgattcttccagtgggacatttaaaggatgtgagaagaccttggtcttctcaaaaacatctgtatttggtcatggaataaatccagatgctacctaaagccaagctagtacctgagcttgtttctgagatcaaagggaattatcaaaatgtgaaacaccttctgcctgacaattgttatcttttactttaataggcaattaatacttgtcagcttggacattttatttccagtatcatgctaaaaatctccttgttgtgtgattcttttatttcttgacatgcacacatatatggatcaaaaagtatgtacaactagaaaaacggactccaagcaaaaatggaaaacatgtttccatgagcttagatttccgggtatattactcctaaacctaaggtagaagtaatgcattgttcacttacatgtccacttttctaacccaagctaagggctggaaaaagaaagtcagaacagtcccaagtaaatatgggaaaccatagcagtgataaaacctaagatttctcagaaatagttttaagtgggaagcctctaatcctacctggacagtgctttcctgtgggtttctcagcatgagtccaaacctcacaaagcaccttcaaagtctgggctacccagtatcacaagtatagcagtaagtccaatatctggatacaggggccaaggaaacaatgaaaaaaccaaatcaaggaccagatgctgagactccccttgtgttccacagttggaagaataagcagttggaccctaggtagttttccgcttcttggcagatggccgctcaaatacatctcgtaccccagctgccttttgtttgaagaactttgtgttctgggcactctcttggccccaagctgagtcaaaggaggtggtatcttgatccacaaggtgagtgtatttggtgcgacctgagcgtccaaagttcttgacctgagggaaggatggatgatgagttataccaccaaacaaaccatgcctcagctatcaatacatcacttttctctgtcatgttattaaggttccccatacctgcatgactttaggaagaatggttttattgaaatgatcctccagggtaggagcgctgaaatctctcttgtatacttcttcatcctcatcctgtataaaaaaaatcttatcaatcttgtggctttatttcctatatattcaaaccacaaatttattaaactctacaataagggatacagagaaagcagagggtattgagcctttcttcaagagcttacatctagttgaagagatgacattcttttttttttttctgagacggactctcgctctgttgcccaggctggagtgcactgccgcgatcttggctcactgcaacctccgtctcccaggttcaagcagttctcctgcctcagcctcccgagtagctgaggctacaggtgcatgccaccacactcggctaattttttgtatttttaatagagacggagtttcaccgtgttagcccagatggtctcgatatcccgaccttgcgatctgcccaccttggcctcccaaagtgctgggattacaggtgtgaaccactgcgcccggccgagatgatattctttttcctttgttgtatttctcctttttttttttttttttccctgagacagcgtctcattctgatgtcctgatgtccaggctggagtgcagtggggtcactactgctcactgaagccttgacctcccaggatcaaacgatgctctcacctcagcctcctgagtggctgggactacaggtgcatgcaactatgcctaattttctccttgagtgtagacgtgtcttgaaggttggcttattctctgcactcaatgtgtttgtttactcatgtgacttcaactctgcataggcctctcaaatctgcaatcctggattttttactggctttcatatatcataagttggatattttattgggacttgaaatgcacgtctaaagtgaaaaccatttattaatacctaacctttccatatcaacctcttctctttaacttttctgttagtaggaccagcgtactcttcgattacctagattcaaaactgagtaacctctgtgtgcattcaatcagttgccacatcttacaaactcttaccacctgggttattagttttcctctactatcagtctcacatactgtcatggcactgatgtttctagactgtaactcattataatctttgccttgctcaaaaacttcaatggttgtctattaaatgaatacaacacctaggctgggcgcagtggctcacgcccgtaatcccagcactttgggaggccaaggcgggcggatcacgaggtcacgagttcaagacccacctgaccaacatggtgaaactctgtctctactaaaaatacaaaaaacactaggcctggtggcgcgcacctgtaatctcagctacacaggaggccaaggcaggagaatcacttgaactcaggaggtggaggttgcagtgagctgagatcgcaccactgcactccagcctgggtgacagagcgagattccatctcaaaaataaataaataaataaataaatgaatacaactcctctgtgtagtaatcaaggccaaatattatacagccttaatccaccttttcagttctctttgccgcttcccttcacagctgatgctttctgcctccactcctgctggtctccacctggaatgtcttcccagcaccgaatgtcaaaaagtctatacatcttggccgggcatagtagctcacgcctgtaatcccagcactttgggatactgaggtgggcacatcgcctaaggtcaggagttcaagaccagcctggccaacatggagaaaccccgtctctactaaaaatacaaaaactagttgggcgtggtggtacacgcctgtattcccagctacttgggggactggggcaggagaattgcttgaacccgggaggcggaggttgcagtgagccaagatcgcaccactgcactcaagcctaggtgacaaaaaaaaaaattatatatttaatttttttttttttgatacagtctcactctgtcgcccaggctagagtgcagtggcgtgatctcggctcactgcaagttccgcctcccaggttcacgccattctcctgcctcagcctcccaagtagctgtgactacaggcgcccgccaccacgcctagctaattttttgtatttttagtagagatgggttttcaccatgttagccaggatggtctcaatctcctgacctcatgatccgcctgccttggcctcccaaagtgctgggattacaggcgtgagccaccgcgcccggcccaaaattatacatcttaaatgcttaaatgttacaacctttacgtcaaccctttcaatcttctaccaaatataacatctctctcgtcagaacccctacagtactttacttttacttatgttatagtgattatgtattctcgctaacagtgctaaacagtgacctttgcatagtatatgcactaaagcttacttactcaatgaaataaacaacattagtaaggctggatgcagttgctcttgcctgtaatcccagcactttgggaggccaaggtggaaggagagtttgagcccaggagtttgagaccagcctgggctacatagcaaaacccatctctacaaaatagaaattaggtgtggtggcacacacctgtagtcccaattactcaggaggctgaggcaggaggactgcttgagcccaggagaatgaggcagcagtgagccatgactgcaccactgcactctagcctgagtgataatattacaatgctgtgatacatatttataaacacatatgctgaaggaattaaaaatagcactatcttgtttaagaaagactttttaaaaacaatttattttgagacaaagtcttggtcagccacccaggctgcagtgcagtggcacgatcacggctgactgcagcctcaacctctcgggctgaagcaatccttccacctcagccccttgataggtgacactacaggcacggaccaccacgcctaatttttgtattttttgtagagatggggttttgccatgttgcccgggctgaactcctgggctcaactgatctgctggccttgcctcccaaaatgttaagattacaggcattagccaatgtacctggcccaccaaaggactttcacatacacttttcttatgtatcttaactagcaatgaactgcttctctaagaaacttgattatt

SEQ ID NO: 97086 - DNA, 198617 bp, Homo sapiens
  misc_feature (1)...(198617): n = A,T,C or G
aagaggtcagtgcttttcgtttcccactagcatgttggttaccccacctcttggggttaaacatctctgcaatgacctgtcaaagagttgattattagctgcataaagccagggatgctgtagggagcagatgggaagtggtttggctgctgcagccaggctgattgaagaatccttggcaattttacagtgtatctttggaaatgtaccaccaaagttactatgaagcctgctgggtttggaaacctagatttctgaaaagtcacctggttgaaaagtagtacttacgaaaactcttcactctcaaaaataggaatatagggacttcctaaaagaacatcaggaccaccaaagatcagtccttgggatatgttttctttgcatcctggtcattcagaaattttggagtagctttctagtagggaaagcactttttgatgggtatattaatagaattataaatttgaaaaaggccttaggcatgtctagactaaccctaccacacacaggagaatcttttatgtatttgcttcacaggtgattatgctttttctgcttaaatactttcagtaaaatagacattaaacattgtgggtcattgttgggaatcaggatattaaattttttcctgagttaaatatctgtctttctgtaacttctactcactgactctctttctaccctcagagtcacagagttactttcttccacactgcacacatcatatacatatatatatgtttttgtttttgttttttctttttgagacagagtcttactctgtcacctatgctggagtgcaatggtgcaatctcagctcactgcctcccagccattatcctacctcagcctcccaagtagctgggattacaggctcccgctaccatgcctggctaattttttgtatttttagtacagacggggtttcatcatgttggccaggctggtcttaaactctgacctcaggtaatccacccgtctaggcctcccaaagtgctgggagaacaggcatgagccaccttgcctggcatcatcatatatttgaagctaacagcctgtcttccttcagtgttctcctttccagaccaaagaatcccagtttctaaggtctttcctcttaagaaatggcttcccagtcttgtaccatactgtgctctgtagtacatcctttcagtttattaatatcacacttaagatgtggaatctggaaatgagcatagatcatcagatgtttttttcgcctccagctaccgtttcagaaaaagtacaatttttaaaaagtgtaatggcagtatcacttgcttactagaaaaaatcccaaaaaacaaaacaatttgccatggcatatggaattggaacaagaggaatttgaaaaaatatcagctttataacttacggtttgtctttccttattgttaaggctttttgaggtacattatcaaagtactggttttccctcacatattattcagggataattgttaatatctgaattgagttttcagcttacaaagtgcagttgatatttgtatttataggaattatttaaatttatgctacattgaactgattttagtatttcaggtagttttttttgtttgctggttgaattttttcagatggcatctcgctctgtcgcccagtctagagtatagtggcacaatcttggctcactgcaacctctgcctcccaggttcaagcaattctcctgcctcagcctcccaagtagctgagattataagatgtactgtcacacctggttaattttcgtatttttgtatttttagtagagaaagggtttcgtcatgctggctaggctgatctcaaactcctgatcctcaagcgatccacccacctgggcctccaggtggaggcccagaagtgctgggattagccactgtggactactttctttatgaattttaattgatactgcattttttgtttccttgtatcttttttttttttagtgttaaatccttttgtcctttcaactaagttacacattttcattttaacctgttatcttttttttttttttgagacacaatttcattctgtcacccagactggagtgtagtggcgtgatcttggctcactgcaacttcttcttcccagattcaagtgattctcatgcctcagcctcccaagtaagtgggattacaggcacatgccaccacacccagctaatttttgtattattagtagagatgaggtttcaccatgttggccaggctggtcttgaactcctgacctcaagtgatcctcctgcctctgcctcccaaagtgctgggattacaggcatgagcctgtgcctggcctctgttatctttttaatgctctcttccttactggcatactttgtttatcatgcatcctgcagcagggcaggcagtacagtagactgagaactgtcagaagctctcagtgagcactaacatttttctgtttcatacgctttccttactcctccagagtctctcttccgttaccattctattttctagaggaaggtcttttgaaactaaggaaagttttattgtttttctagggataaaacaaggtggggttgttttaatggttaaattacatactgaggatagtgagtaacccttagattaatgtaggttacactctaagcctagccacaattgcaaagattagagaactaaaaaattatgatttggggaagaactgtgctttaagaattctctatcatggaaattcagttggcatctcctttcctagagatgccctctgcccctcataatagaaaaattattttcagtaccatgttccattgccttactcactgtcttacttgctgctgtattttcagcacctagtttagtgcctggcacgttgaaggcaataaataaaagattttctaacaaatgaataggtatctactatgctatttcatggaggccaagtcttcttgtgtagtgttgagaattccaaacaggttactaatttcttcagaatcctagatcattttcagagtttcatttctttttttctttcttttttttttttgagacagcgtctcgctctgtcacccaggctggagtgaagtggcacaatctcaggtcactgcagtctcgacctcccaggctcaagccatcctcccacctttcagctccctgagtagcgggggctacaagcattaccatcatacccggctaatttttgtattttttatagagacagggttttgccatgttgcccagactggtctcaaactcctgggctcaagtgattctcccgccttggcctcccaaagtggtgggattacaggcatgagccaccatgcctggcctagagttatcatttcataagagattatgtttcctttaccttgtgagtaacttttttcatagtttgtacatcatatcatccacccccactttttgctcatctcttataaagtaggatctatgtagacttggcatttactaataaatagtggttggttgctgttaacactaagatctccacttgggtaatggatatattttcttcccacatctacagctaaatggcagataaatgtgcacacctctcccccttaaattcctgttgctagcaggcattcacctggctcccctcctttgctcttctactgtgacatcttttcttgcccctacaccctagttctttgacattgctctgagggaataggtaaaaaagtacaatttgtcttgtctgtgtcctatctgtggcatttacagatctctacaaagttagagatccactttgcagaattcactgtgacactactggcttgttctttctactcaattaccttataaaaattactttttggctggacacggtggctcatacctgtaatcccaacactttgggaggtcgaggcaggcagctcacatgaggtccaggaggttgagaccagcctggccaacatggtgaaaccccgtctctactaagaatacaagttagtcagtcattgtggtgcacgcctgtaatcccaacctcttgggaggctgaggtgggagaattgcttgaacccgggaggcagaggttgcagtgagccgagatcacgccactgcacttgagcctgggcaacagaacaaggctctgactcaaaaaaaaaaaattttttttttaatggatagagaaaggtggtggacagaggaataagcaagaacagaactctttggctttatcataaaataatactggatggtatatgttgactgccaggttttctagatggcacactcctcaagtcttgttagtcaggagatagtggagacagagtcttactctgtcacccaggctggagtgcagtggtgtgatttcagctcactacaacctctgcctcccaggttcaaatgattcttctgcctcagcctcccgagtagctgggattacaggtgcctgacaccacatctggctaatttttgtatttttagtagagacggggtttcaccacattggccaggctgatcttgaactcctgacctcaggtgattagcctgcctctgcctcccaaagtgctgggattacatatgtgagccactgcacctggccataaattgcacttttaataccccatcaccaccacccccttttgtagccaatctctgtttcctatggtgtgaggcctggtgtttgtcaatacagtgccatcagtattacatgagaaagtgaagagttattctacatcctggtgttaggatttttagtagtgtccagtttttcatagagtaaacatttttctttatttgtgtgtcgtcctattttagtgggaagtgggaaaggccactttgaatcctgctattgagataataatttgaaacctggagttttagaaggctgtttcagcttctctgaacttaagctgattggttgagtcccctctgagattgtctcctctagttcaagtcttagccccctgtcctgaagttgcattttccccagttctgcttgtttttctctttcattcttaaccataagacttttccttcccaatagtaggaggaatctatactatttgtactagagatagaccctgttagagagtttttaaagcttttgctagatcatgttctgcgtctctgataatgtaagaaaaagcaaggagaaatgggggtataagtaaagttgtgctagagcttgcatctgtgatatgccaggacctgtattgattgaggaagggttgccagctgacagtggtagtagaaataggtctcttaggagtgggaaattaactctagaggactcctagttaagacttaccatggaatctctgggcaattggaaatactgtactttcccctagggagatggagtgggaattgatttttccttaggtccaatgtaacttggttagaaatacaattgaacctgtttgtcatgtctgttgtgatatgatagccccataggaagggtctgtttttgtgtgggagtttatttcaggcgtctcttgcctgtattgtttcttttaacagctttttaaattttctttttccagcaatgatgttgtccactgggcatgtactgaccaatgtggcaggtctgagaacatagctgaagctgaaaataggaaagctgggggcaaggaagagccttgaatcttgaggtgggacgttgactctaagatgtccttgagcagtggagcctccggagggaaaggagtggatgcaaacccggttgagacatacgacagtggggatgaatgggacattggagtagggaatctcatcattgacctggacgccgatctggaaaaggaccagcagaaactggaaatgtcaggctcaaaggaggtggggataccggctcccaatgctgtggccacactaccagacaacatcaagtttgtgaccccagtgccaggtcctcaagggaaggaaggcaaatcaaaatccaaaaggagtaagagtggcaaagacactagcaaacccactccagggacttccctgttcactccaagtgagggggcagctagcaagaaagaggtgcaggggcgctcaggagatggtgccaatgctggaggcctggttgctgctattgctcccaagggctcagagaaggcggctaaggcatcccgcagtgtagccggttccaaaaaggagaaggagaacagctcatctaagagcaagaaggagagaagcgaaggagtggggacttgttcagaaaaggatcctggggtcctccagccagttcccttgggaggacggggtggtcagtatgatggaagtgcaggggtggatacaggagctgtggagccacttgggagtatagctattgagcctggggcagcgctcaatcctttgggaactaaaccggagccagaggaaggggagaatgagtgtcgcctgctaaagaaagtcaagtctgaaaaggtaagargtggccagatatggctgcccactgactgccagtcagaactgccctggactaactgccaaatactatgtgtactctgtgggaggctcattagtgtgtgggtaatgaccaattacaaggtcagagcagctggtaatgataatgtggttttcttccaaattagaggattcccctacagactcatttacagcaggcctggacattgtggaacaggatatttgttgttgggggcagctactttgtagaatgaactttctgtagtctgagttgagaccttcccaccttgtctttgcccacctcagacacttgttggtagagattggcatcagacctttatttgtttcccagcttgactggcatttcatcatcagactcataatagttgataaacaatacgcctttggtgataatgtagattgagtacggttcttgatgggataaatggtgctgttgggtctctggtagaacaaagggctaaatttcatggcatatctacgaagtgttctattgccggctaccaaagagcraaggggcacattttgagggcaagaggtactcattgtactttgaggtacttagatcttatgagttattgttgtggttatgacagtttggcctaggaagagattggccattaaaggtgtagcttcatgccaggtatctcccacaactattaggaatcaaagtctcctcgtggtttaatagctgccaacagtgtaatgataccttgccttctgcttgacttggaaggacaggtgcctgcagccccaggaggggttagaactgagtccctcctctgggaagatgatcttagttcatgctttaggaaatggaacttgcagggctggaggagaatgggtgtgagtctagggtcagctcaggcagcattaaacttcagcagcttattcctgcaaaacagtggccttgtggtgagctgttcattggctcttgattttctgctctgtgctctgctcatcctgtgctttcagctgatcccagcagatgcagtataaattgatttctctgtaattagatcagctgcagcagggaatacctatttccatatgtaagtgttaataaataaaggctggatgtgtatgtttgggtggtggtgccctcttagtgcctgtattccagtggtagctcatgctttctttgctgtcggtattttggtctttgcctctggcacatctgtagctcttagcaacatctgggcttctccagtagcaggtctgtgagtttcttccrctaataatacagtggctcattcccttttaccagtggcagctgccagagaggctgcctgtgtttaggtggcagatgctatagtccacttcagcagagtcaggttccagctggttactagcttggctcatcctgtgctggctgtgatttgctattttctctcgggtacagatggataatactgttttaaagaggcttaggagtactagcagttgttgcttctgttccaggcccattagactgttccctacatctggcttcaagaaactcttgccatatatccatattcataatcattattcttcctgtgctaaaaagtacttctgaggatgaccttcattctcctatctaaattttagagtacttatgttgcaaccttctaagcccagtgatagtctgtggatgaaaggattaatattgcttagctttatgttggatttaagtgtaaatgtccatgattgtctctaacagagaagcaaatggaacccattttctcacatagaggtgcagggactgattgggtggctgcccttcagattataattgggctgaaagatgcagtatgttcagctaagaatacatcctggtgccagggagttttgtcccttaataatgttgctttgccatataagctttgcctcccagggagactctgagaatggggcagcagaatgagaaagaaaagggaaagagactgtgcttcagtttttgaaagatagagaaaattgctggcaattacttttagaagcagaaaatttgctatacagtttcatgtaaccataagcaagaacctgctttctcaattccttcccctgttccctcaacccttttggacagtctggtcctgagggtgcctttccatattacctttggctattgaaataaataattatttaaataaatgtttggaagttgctaggagattaaaacatgctgtgcagggagagaacatttctggactgggaggagcagaagaggcaagttaaaggaaaggaagttaggaaccatgcagaggagcggtttttgagaaacaacaatctccggtttggggcataataggtgctcagtgagtatttgatgattagtactataatttataagcaaagtctttgaaaacttctttaaaattttctctctgagaaatgggcttgcctgtggtttgggacgtttctatgtagggataacaaacagaaccaaaatagcaaaacagatgttttgatataatctaagaattgcatcctctcaactgggaactgtcatgaagaggaagaactcataaaatttgggaagtttcttgactgaattctgtggtgcagagtagcagtgttgactactagccaatgaggaagatttgaatattgaaattactggctgggcctggtgattcatgcctgtaatcccagcactttgggaggcctaggtgggcagattgcttaagctcaggagtttgagaccagcctaggcaacatggtgaaaccctgtctctacaaaaattagccgggcattggtggtgtgcacccgtaatcccagctactggggaggctgaggtggaaggatagcttgagcctgcgaggtggaggttgcattgagctgagacggcaccactggactccagcctaggcaatagagccagaccttgtctcaaaaaaaaaaaaaaagaaagagagaaattatctatctcatgttcttctttgtgaaggtagatatctcaggctatggcctgggaaattttctgtcagacaargatgtggatttcccttcatgggatcccacttttgctcgaccataccttcctctgacagagtgagctctgtgctgtttcccagagttctaggagagaccagagatggctcttagcaactgctgctgctctgaattgttattgaacacttctgcctcatacttcctgccagctgaagagatgggggagggaatgttgaggaataaacaagacagagccttccagctcttgcctgttcccttgcctttagtttgattgatggattgttaagttagggatggaaggggaggtagggaggagggcaggcgcctgtctgagtgtcctgagcttagtgcttatgtcgccactctgacaggcaagaaaaaaggaatttacaaaccacagatggcaacgatctatctgtgctgactttgtcagggcttacgaccaggagtttaaggtgagactccttcttttcccccaaatcatataaaatagccaagtaggctctagtagttaaagaaaggatctagaagtttctaaccagaagctccccctcacatgtctttagctgctgcttttgatcttgcaaggtaggaacactgcactttgcttttcccgtgtttgartgtcagcttctgctgctttcagaatgctgcatatatttaccacttcccccattagtttaggatacaaagaaaaccataaagtgtgctctttgctctttcaacttctgatcatgcatgctatcatatcctgtgttcttaagagcatcttcctttgccattggttttgtattcctgccctaatttgtgccttctagcttagttctcttgtattgtagtccctcattgcctaaccaaggtcaggtctcttttattccttctgatccaaggctttcttaacgccttcttccactagctgttatttctcagctattgatggcagagcagtcagctttgcttcctgaaaccaaatgccctcaagattttccttcatggaaaacattaaaaagaagttgatatttatgtgggacagagttgcattctgtaactacaagcttaatttattttttcattcagaaactctgttttccttctaggtgttgtaattcaaggcagttccagagaaagattatcttgtccaatttcctcattttatagaagaaactaagaccagtgaagtcctgtgacttgcccagcatctcacaggtagtcactggcaaagccagatttgtagacaccaaattcttatggcatgttgttactctgggattcttaacaaatctttaactgtcaggaaggattctcaattttcccactttatttgttattttcttagtattattattttcgagatggagactcactctgtcacccaggctggagtgcagtggcacgatctcggctcattgcagcctctgcctctgattcaagcgattctcctgccttagctccccgagtagctgggattacaagtgcataccaccatgcctggctagttttttttttttttttttaattttagtagggataggggttcaccatgttggccaggctggtctcaaattcctgacttcaagtgatccacctgcttcggcctcccagagtgctgagattacaggcatgagccaccacacccagcctatttgcttatttttaaggcagggtctcgctatgttgccaatgctgatcttgaactcctgggcttatgcacttctgccttggcctcacttatgcacttctgccttggtctcacttatgcacttctgccttggcctcgcaagtagctgggactacaagtgtgtgccaccacacccagccattttttcaatgtaaagactaccttgaaacattagatgaaaatgcttacatactccaaaattgcttttaccccaaaactgctttcacttgtttttcacagtgactttaacattgtagacactcaataaacaaaggatctttgagtttaggattttaggtaaggtaatgaatgatgtttgcaaagaataaccattacagctggcactgaacctatcctgttatttataaagaaggaaagttactttaaaactgctactttgagcttgactacttatgatatatgtgtgtgtgttctggaatatttcatccagccaaattttcattataataattgaggaatagttctttctttacttggcaattgcaggtaagaaaaaaaaccctgttctagtgcttcttccttggacacatcactaataggcagaccttcaaatgtattgtggatattactaagtattttgtagagaagatatactgttggctaattgttatcacttttcattcagtcagtacattaattgaatgcattttagatactaggttttctacttggtattgggtatacactggtaaataaaacagagatggtctctgctttttgaggagcttacagtttaccgtctacagcagagttcctaaaagtgtgtcccataaaaccatgtacatcaccagagtatcaaaaatgcacattcttggaccctaccctagatatgccgaataagtttttggggtaagggcccagaaatctgtacttccagaagtctctccagataattgctatatacatcaaagtttgagaattttcctttcaaggtaagtattcggggccacttctcatttaaaacaccagccttctaaacttgaatttcacatcaactcttatgtataatttagtggctaaaagcgtaaactctagccaggcctcctggcttgagcctgggaggttgaggctgcagtagtgagctgtgatcgcactagtgcactccagcctgggcaacagagtgagactccgtctcaaaaaaataataataataaattttttaaaaagtgtgaactctggagccagactacctggctttgtttcctacctttgcacttatttactgagtgatcttgaccaagtttcttaattgttcttcctcagttttcttatctgcaaaatgagagaaatagcacctacataagtttgtatttatttatttatttatgagagggagtctcactctgccgcccaggctggagtgcagtggtgcagtctctgctcattgcaacctctgccttaacctccagagtagctgggattacaggcatgcaccaccatgcctggctaatttttgtatttttagtagagacagggtttcgttgtgttggccaggctggtgtcgagctcctgggctcaagtgatccacccgccttggcnnnnnnnnnnnnnnnnnnnnnnnnnnnnnnnnnnnnnnnnnnnnnnnnnnnnnnnnnnnnnnnnnnnnnnnnnnnnnnnnnnnnnnnnnnnnnnnnnnnnnnnnnnnnnnnnnnnnnnnnnnnnnnnnnnnnnnnnnnnnnnnnnnnnnnnnnnnnnnnnnnnnnnnnnnnnnnnnnnnnnnnnnnnnnnnnnnnnnnnnnnnnnnnnnnnnnnnnnnnnnnnnnnnnnnnnnnnnnnnnnnnnnnnnnnnnnnnnnnnnnnnnnnnnnnnnnnnnnnnnnnnnnnnnnnnnnnnnnnnnnnnnnnnnnnnnnnnnnnnnnnnnnnnnnnnnnnnnnnnnnnnnnnnnnnnnnnnnnnnnnnnnnnnnnnnnnnnnnnnnnnnnnnnnnnnnnnnnnnnnnnnnnnnnnnnnnnnnnnnnnnnnnnnnnnnnnnnnnnnnnnnnnnnnnnnnnnnnnnnnnnnnnntgctgttgcactccagcctgggcaacaagagcaaaactctgtctcaagaaaaaaaaaaaagtttgtctttagattaagttagctaattcatataaaacacttagtgcctggcacgtaggaagcattcaataaatattagaaaaaagaaaaatacagtttgagtggaaattggtcttagtctctcctaggcaataatgtactgaaatacaacaacattccactttacaggaatcccagtatgaatagatatacatgttagctaagactttttagcactatggtctgaagaagttccaaatctaggctgggaaattttcatggtggtgatgtgttctaaagcccctgataattatagttggaggtggggggaagaccaaaaattagcttagggcatattgaagtggcctgttgaatttcagacttcatatgaatcgagcttcttttctggccatatccctggcatggggttgggtatgttggatagatgttactgtggttttgccggaatatgcaatctcacggacactggagtagtgctaagtgtttttgtttctacacaagactgcatggaaaaaatctaagtcttagcccttaatcttcctcccccagtgtgaacttgtatttttgccatttgggtataagagcttttaccagcagagctcatccagggaggcagcagggcttgggatgtggcagtaacatacacagctgagatcctgccactgctggctgtctgagccctctctctgtggttttcactcttcaagccatgcttgagtaacccgcctccagagctgctgacagggctgtgttcagaggccttggaaattacactgttcatttccttatcatcccctgacctgcagtgcagagccttctggtgcaggaacaaggcagaaaaaatccagacggctcccagccagcatgtgtcaagagctacaaagaaggaaattggacttgctcacttaaaaaccatggggttaggctttgattttcagttcctgtggagagttatttgtgtgtatgagcatgttgtatctctgtgtatatgtatagaatgagtctgtgcgtggcaaagctgtggaggaggaccatttgaaatagagagcagagggaagatggcttttctcttcacttaatttcccagttgtgccattggggtgggcctggaaccattagcatcaggaaggtgccagaccatattaatattttaaaatatatttctctcggtacagtttagtcatggttcagagcacccacagaagaacctttcctggctgaccgaggagacatttttaacaaatcctattccctaaagtcattcatcctagatgacattgacatagtcaatatttaagctgcctaagaaagtgtagactttgggtcagtcctgggtaagagcaatagctcttttgagatgaaggatagtgtgataaaagagagacctttgtgatagctaaggtgaactaaggaggaatttggagcattttgagattttctgttcacagggcaaagttctattatattttaagagcccatccttgttttgggggttggtattacaaagcaatctacttttcttttggcatctgttgctcaaggaggcccaaaggaaggacttcaggctgaagtaaaatgtgagcagtaagaagttcttagcaaagtttataaatattctgtccttaattttcctttttctggatttcatgtgccttcatgttagtggtgccattgaagcctttgtgaagtggggagaaaaaaaataaatctttaagctgtcagaccctggaggtgttttaaaccctaagtgtctgtcttgttgaaagtactctgtagagaagtgtcttcacataaggtgatagctaaggtgagaggggactactttcttttcccttcatataaattagtgggccctgtatcagcagcaaatgagaattcgataaaaatttggatctcagacctcctcccagtccctaaagttagaaactctaggcttgagacccagmaaattttttttttttttttttttttgagacagggtctcactttgttgcccaggctggaatacagtggcacaatcaaggctcactgcagcctcaacctcccatgctcaagtgattctcctacctcacttcctacctccccagtagctgggactacaggtgtgtgccatcacgcccaactaatttttaaatttttttagagacggggtcttactatgttgttcaggctagtcttgaactcctaacttcaagcgatcctcctgccttggcctcccaaagtgttgggattacaggtgtaagccactgtgcccagctgagacccaacaatttgcgttttaacattagctgtcctgttgattgtgatacacactaaagtttgatatctactattgtagagcacccttccctcttaatagtgaaattgaaattaccaaaaactttaaaatgtaacgctgggcagtaggtatgatttttttcttttaaaaatatccttatatatctttaactctttgtggacaaactgacaggaacctaaaattggaatgaatatctaagggcttaggactttcagagcagaagagcagaaaagatattcaaaaaagacccacttttctcatctgaatggaggaagtaaataatagtactgacctcatagggttattgtgaggattaaatgagatgaaaagagttaagcattcagcacagtgcctagcattatagtaagtaaccaataaatgttagctgttgctgatgttactgttcttagctttgaggtgcaaggtcattgtgaaattaaggagaaaggatatccttagagactttgaagaattaatcccctgaaggctttggaaaacaatgaatttatgatagctaatattccagctcctactgatttccaagaaggcttcagggagagattgattcagagcatttggaggcattgaagtttggggttttgttgtttgattggtcagtttggaagtgtgtgttggacttcttttggcagagggctgatctcaggttgagaaccatggcttttgtttattctccattaaggtcagtttctttggtatataaccaacttcttctgaattattttcctaagaattgaaatgaagataacatgattgttttcatacaggaagtttctttcctctctctgctaatccttgtaaggtacagactagtcttttgaagggattagcagaggtagccagaacagtcaagagaagaatgaggattgaagtactgtagtccccccaaccttatccttgtttttgctctctgtgatttcagttaccctcagacaaccaagatgtgaaaatattaaatggaaaattccagagataaataaatcactaagttttaaacactacattattcaccccatttcatctcatcccataggcattttatcatctcacatcatcacaaagagggtgagtacagtacaatattttgatagaaagaaaaagacaccatattcacataactttcatcacaacacattgttataatttttttttcttttttttttttttttaacagacagggtctccctctgttgcctaggctgcagtgcagtagtatgatcacagctcagtgcagcctcaaactcctggcctcaagtggtcttcctgcctcagcctcccgagtagcagggactgcaggcatatatcaccacatcgggctaatttttaattttttttatacagttgggatcttactggttgtccaggctggtctgaaactcctgggctcaagtgattccccctgcctcagcctcccaaagtgctgggattacaggtgtgagtsaccatgctcacaacctgtgtcttactgctcacacctgctcttactgtgtctaatttataaattaaactttatcataggtacgtacgtagaggaaaaaacctagtatatgtagggttcgataatatctgccatttcagacatctactgggggtttttgaatgtatgtcttgtgcttaaaaggaggctactacttttwtgtgaggaaataaaaaagacagtttttagatgttttgaggtggtcaggttttaccctaaaatgtttgttgtccattgggatgtgacaatttgactgtgcacctgtgaaatactctaattgctttttaaatttaagactgctgggttacagccctagtggcaaatactagattatgttttgatgagccagacctgggcattaaatcctttcttgggctctgttttcatttggtaatgagttcttttttatttttatatttatcttttattgttttattttacaagtttccacatagcattgatttttttttttttttggttccttcattttaaaaagtttttataaactggtacctaactcayccagctcagagttgatatttcctggcttatgtgttgctttttttttcttttttgtttcttcagaagtcaggtacttagttctgcactgaatcaaaccttagtgaaagacaacagagtgttgtagaaaggaggtatagrggccaggctcggtggctcacacctgtaatcccagcactttggaaggccgaggcaggtggatcatctgaggtcaggagtttgaaaccagcctggccaacatggtgaaactctatcactactaaaaatacaaaaatttagccaggcatggtggcgtggtggagtgtgcctgtaatcccagctacttgggaggttgaggcaggagaattgcttgaacctggaaggaggaggttgcagtgagctgagaacacgccactgcactccagcctgggcaacaagagtgaaactttgtctcaaaaaaaaaaaaaaaaaaggaggtatatatagtcgtcatacttagaccaaccaaatcagcatactgaatgtatcctataacatctgaatgttacagaaattaacattcaggttgcagagtttcttggtcgtgagacagcttagggtacgtatcagagtcacttctggaggttttacaaagtataagtgtcctactggataaaatctttgtggctggagactccaagcatgtaattttttttttttttttttgagactgagtctcgctctgtcgcccaggctggagtgcagtggcgcgatctaggctcactgcaacctctgcctcctgggttcaagtgattctcctgcctcagcctctcgagtagctgggattacaggcacactccaccacgcccagctaatttttgtatttttagtagaggcgggatttcaccatgttggccaggatggtcttgatctcctgacctcgtgatccaaccacctcagcctcccaaagtgctgggattacaggcatgagccaccgcaccctgcctacttttttttttttaagttcaacaggtgcttgtaatgttcttcttggttaaaaatcactatcatgtgaaaaggactctcctttttcattgctcagtgtacaggatgcttatgttggggtcaggcatttcggaattcaactataatgaacctgatttctcattatcaccttaattaggagaattaattattgaatttctgacagcctttaaggtagagcatccatatttgtgttactaattcagttttaaattattgttccagaatttttaaggcaaatttaagcaaaattcttatgagtagatatatttgccacatataggctatttgagcttttttttctatgtagattagaaaggggcagaagacagatttggataatcaaaatttatggctaatccaaaaccagtctcttttctcattggtttgtgaatgtatttctgtgcttatattggataataggtgttcctaattttctggaaattcatgacatttgaaaataaaataatgtagcaatacaaaaaagaccttattcctgagtctgcttctggatgcattcaaagtaaacatgctgttttaggaagaggaaatatcgcatcacagaaatagaacaagcaccttatatcatagttctttgttgttgatttttttwaaaataaatacaatttatttgaaatcaaaaagagcattaatgttttggggtataaagtatttccttgctgagatttttaagtcttatgcctgaagaagagtaattagaatgctaattgttatcaaagatgaacacatacctaattgtgcagcaaactcatacttttttaaaaaaaacttttaggtttagggatatgtgttgcaggtttgttagatgggtaaattgtgtgtcacatgggtttggcgtgcagattatttcctcatccaggtaataagcaagcaaactcatactagaaaacattgtggtatgtcaaattttagccaaaataataattacgtaaccttaaattctcataataaaattttaataataaattaatataaaaatttaaaattttaagtgtggtttttagtactggtacatgcattacctatctatcttctcagaagttatattaatctgtactttagatggatctttttttaggttttggagtatctcaaattcatataccactgtgagtaggaggagaaaaaattggcaaatgtggggaaaaactcatcatacaaagtgactacacatttatatacaccatattagactagatcttaatttcatcactatgcagattcctaaacatctggtagagtgtctgttttagataaaatatgccataaggcatttttcattttgcttgtacatatgtgcttggattgagaatgtagggatttgaaatcaaacaagctgattgcttattacaatttcagaaggagactgagaaattctttcatttttgtttgcttctagtatctctcctgtcctttcccatctcttaaaaggattaggttctaaagtcaaagtgtgaggcactcagtcagaagttacctacagaatttcttaggatgatttcttgaagcttgacatactggctccatgaattcaacacaatcagttttttctttagcattgagacaagccattatttcttcagctgaggtccccacataagagctgacttgtgtgagagctagactatattaatgaaaaatatgtatttgtaaatactagaatcaccctaagcctagtaaaatgcttatattatgagaggcacatgggagtggaaaccagattaaggaacagccagctggctgggcaaggtggcttacacctgtaatcccagcacttcaggaggccaaggtgggaggactgcttgagcttagaagttcaagaccagcctgagcaacatagggagggcctgtctgtacaaaaaactaaaaaattagctgggtgtgktgatacatgcctgtggtcccagctacttgagaggctgaggcggaaggatcacttgagcccgggaggtcgaggctgcagtgaaccatgatcatgccactgcactccagcctgggcagcagagcaagaccctcaaaaaaaaaaaaaaaaaccaccagttcaaatctcctatctctggcttcctccagagcatatrctcaataagcagaacagctgtgaggcccaaaccattcaaattggtttttgttcctttctttctttttttgccagttacatacagttgattttataatgttaaatattatccatttagtatacaaaggtattttatgacaatagagcaaatcttaggatccagattctctatgtagtggaaactttgggtccatggaatgaatatagcttaatgtaatgattattgtaatatttacatttcagttccaaccttcatgttcttcacagtgtccacaaattccttccctttatttctgtatagtaacctcagatcttatcgttgaattgaacaagaactatcatgtagcagagctgttctcctcttaccaacataaatatttctgagcctagtttcgctttcttaggcccagtgcctttggtaggtcctttgaggtatacctttcaccttctagcctcttctcactttcacctttagattctatctaaactatgcttttttttttttttgagacggagtctcactctgtcatcccaggctagagtgcagtggcgcgatctggattcactgcaacctctgcctccccgattcaagcaattctcctgccttagccaccccagtagctggaattacaagtgtgcaccaccacacctggctagttgttgtattttttgtagagatgggtttcacccacacttgaggctggccccaaactcctagtctcaagtgatccttccgccttagcctcccaaagtgctgggattagaggtgtgagccactgcgcccaccctttttttwaaaattttttaatcctgctttaattttttgttgttgttgttatttctgaaataacattttacatttgttgttggtcttgtcttaagcaaatgggattatatttagttatgcagatttaggaagggctcttccttccttctcaaataaaaataaccaggaaaaagcagtcgttttcatatgttctacctgggacattcattatagtctgggtacagcatwgtatgtatcttgaaaactactgtactacctttgacagtgaggtgttttacccatagttcaaaattgctgttactgcctagagatgacactgctgtgaatagtataccttattcgaaggcttggtgcttttaggcatggactggtggcatctcttggacaaggcattgcaattgccctggaggactggccaaacaagttttcatgttgaaaagctgagtaaaaatgactctgggtgtaggccaatatagtatcactcgggaaaaagaaaagcacaatatgcctctccctgggaagcagtttggccagggcaaagctcccagaaatggaaatttaagcttgttgatttgggaaactcttggtatttgcccctcagcctttgtgaaatggatcttctttttaaaggggggaggggtaggatagaggagacttaaaggcttaaaataatgtcccctctgaaccatctaatcacctccttagaactaagcaggtaaggctgggcgcagtggctcacatctgtaatcccagcactttgggaggccgaggcaggcgaataacctgaggtcaggagttcgagaccagcctagataacatggtgaaaccccatttctactaaaaatacaaaaaattagccggtcgtggtggcacacgcctgtaatcccagctactcgggaggccgaggcaggataattgctcgaacctgggaggcgggggttgcagtgagctgagatcgcgccattgcactccagcttgggcagcaaaggcgaaactccgtctcaaaaaaaaaaaaaaaaagaactaagcaggtaaatgtcctcatgtcacagaagaaaagatcgacttgtttagaaaccaagttaggtagggctgtctgtagttggtagtaaattatcaacctgaagtggcattcaggccagagaaaagtcagggaagatagttggaaaataaaaccccaatgactttttcatatttgactaaaattttcagatctcttattgttcttattccttagtcatatttcaccctccttcctgttttatatctaataacctgaagcagaaaagggccaggccaatcctactttaatctcttccattcccctgcccccctggagtatattttttaatttttaaaatttatttgtatttgtttttcgtttattcagtcttgctgagttaagcagaaacctcatagaggtggggtttttttgtttgtttttgctttgttttgagacagagtcttgctctgttgcccaggctggagtgcaatggcacgatctcgtctcactgcaagctctccgcctcctgagttcaagagattctcctgccacagcctcccaagtagttgggatgacaggcatgcgccaccacccacacccggctaatttttgtatttttggtagagatggggtttcaccatgtcgcccaggctggtctcaaactcttaagctcaaatgatcctcctgcctcaatcctccaaagtgttggattacaggtgtgagccaccatgcccacccaaataatacttttaaagaaaacttagattttattgtggtgccactatatactgggcatttattaagaatatatatatatttttaatcttgtattgatcttatcttagggatggttccttataattgcatttatccttcttatgtgtttctgtatctttcagaaccatttccagaattaatcaggctaccgaacaataagtccagtcttagcttatcaactctcaggatgattctgattttaaaaattttcaccaggttccagcagtcccttatactatatcaatttcttctctccttaacccctactccggaaactttttacttgataatgtttgtctggctcttccttatttaattgcgagttttaagcttcttgctttaaaaatatagcattagctgattttaaaattacctctgggctgrgtacgctggctcactcctataaacccagcactttgggaggccaaagcacgtggatcacctgaggtcaggagttcaagaccagcctggtcaacatggtgaaactccatgtctactaaaaaatacaaaaattagctgggtgtagtggtgcatgcctgtagtccaagcttctcaggaagctgaggcaggagaatcacttgaacccgggaagtggaggctgcagtgagccgagatcatgccactgcattccagcctaggtgacagagggggattctgtctcaaacaaaacaaaacaaaattccctgtgattcaacagatcctatatgggatgctttataacaaaattaatgtttttctggacttacaggttggagggctatcctagtcaagcagttcaaatttatggatactcattcagttcatccaacaaataattattaaataactaccatgtgctatacagtgtgctggcacttaggataaagagttgaagccaggcatggtggctcacacctgtagtcccagctacttggaaggctgaggtgggaagttcctgtgagcccaggagttcaagtccagctgggacaacatagcaagatcccatctaaaaaaataaaagttaaatggatgtggtctctgctctgtggagtgtgtgtatatatatgatatataaataaaaattatacatatatattattattattatttttagacactctgtcacccaggctggagtacagtggcacaatcttggcccactataacctctgcctcctgggctcaagtgatcctcccaactcagcctcccaagtatctaggactacaggtgcgtgccaccacacctgaccaattttggattttttgtcgagacagggtttcaccatgttgcccaggctcaccacgttgaacccctgggctcaagtgatccacccgccatggcctcccaaagtgctgggattacaagcgtgagccatcgtgctgggttcctggagtttatattctaatgtgggagacagataaattggttattataacaaactttgatgagtaatgataacatagggtattgtgggtgcacagtggtggccagagtatagtgtaggatcaaggaagatctctgctcaaaagaggtgatggagatctctaacctctctgatagttaaacagagacccaaagggataagcaggaattagacaggtgatgggagagagggcaaaaggcttgtgccaggtgagagaatagcataatcaaaggctaagtggtaagactaatcttgaggcatgagaagaactggaagaagttcactatgactggaggaggaggaatagaatggtaagatgaggctggagtgctatggggtcagatagtagaaggccttaaaagccttgttaaaggatttggatttcatcctaacatctgcagaaaactattgttagactttttagtggattacagtgattgatttttgagtttttgaagaattactcttgatgtcatctgcagagtggattggagaacaagattggaggcatttaggaagctgttagcatagttagcaagacagctggaccagaatagtattaataggaaaggagcaaagtgggtagatttgagagaatagaagttcaattgatagcatcttggtaattgataccatgttgggaagagattgaagaagaagtcgagagtcatgtccagattttgggcatgaaccaagctgttcatggaaccacttactcataggagggaacactgaaaaggggcaagtttgcagggaatgataatgagtttaacttgggacatgttttgaggtgcttgcactgcctgtgctggggataatgtaagcaaaatagatttggtcctgctctttctagggcatacggtttagtaggggagatagaatggaatcaaacaatcatatgcacatctatcattttacactattaaaattataaaagtgaaagttataggatgctgagagcctataattaggaactgaaccattcttggcgggtgcagggcggggggcggggggcgggggcgggtcagggaaaatatccgtgaagaagtttgagtaaatatctgaaggataaatggtagttaatttggaagagggagttgaatgaatgaacaaccaagtagaaatgtctcttgaggactggatgtgtgagagagagaactggaaatctaaagatttaagagtttattaatgtgaacacataaatggtaattgatgccatagaagtgagtgcacttacccaggaagaatgtgtctgtattgaatgaaaggggctcagtatgggtcactgaggaacaccaagaaggtagctaccttagwtggcatattgggaactgcttccttgtgtcctagagagaatacaaaacccacagctgggaacatatgtctatacaaacattttaaaatccactgaaagaggttatagaacttgcttggttctgtagttagaattggttttattggattgaggcacactttgaggaaaagttcgtttctcatgccacttatgaacaatggaagagtgatctttgctttttattttaaccatttgccatattttccctgcctggcatcatcactctcaacttttttagttttccttttttcttttttgacctaattttcagttatttaaactctcaacttctaatagtattaaagtgaaagcatagatattgtaatcaggcctatgtttgaatcccagcactgactgccatttaatatatataggatcttctgcaaattacctctccgtatctcattttccttagattttatatggttttaatttaaaagatctaaaagtacactgtaaatgcacagtatatggaggttatagtataatagttacaggtcagcaacaaatgtttgttctattttcctttctccttgcagcctctcttgtctttccaggcaggtgagtagtttcatctgtgatcatttatgctctgtaccacctcctcatggcagtatgttacagcagcttttctaccagagcataaggagtcttgcatttttgtggtaaaagtcctttctggagaagcagtacaggaaggtttctgggttgctataaccaggatttttcaacaacaacactattggtatttggggctagggtaattctttgttgttggggtggtccagtttattgtaggatgtttcacagcatccatacctttatcatattcgctccaaggtaagacaaccaaaaatgtccccagacactgccaaatatcccctggagggcaaagtttttatttgagcactatttgctaaaatattgttgtggatgctatttacataactgtgtgttcagtttatgaaaatgcagagttgtacatatatgatatatgtagttttctgttgtgaatgttgtttccgtagaaagtagaaaaccaaaggcagttagagagccaggctccctaacctgtgtctcagtttttattatccccaaatctctatttttctttttgtttttttattctcgttttcttaaatttttggctaatattttttttcccacacgttctggtattctccccaaatctctaaaaggtgaggtgaaattaagggagaaaagggttcacaatagaatgggaagacaacaaaaagtaaccgagaaactgacttccaaatgtctcttcaattcctagctgttaggatatggaattcaacctagggaaatttctattacaagatttcagaaataagctctgagtacgggacagaattaaattatcagccgaagagattattttattatctttcttcccaccttctctgctacactgacagcaaaggagaggctcacctgattttcgtcacttcagctgttacctttacctgatggccactgaagttatttctgaaagtgttcgcttttacttttaatttaaaatctttccgttcttctttactttgtacaggtgggtagaaagtccttccatattagataatgttgactaccccctgagaatgtagtccccagagaaatccttggatagcactcaagctggaagcaataggttaagtaacccacgtccatgtcttaagaggagtccaagataagatcccattttgaagtttgaaagatcctgtaaagggaaggcagaccttgggccaagcagcctttgaggtggtaaccagctcataaacaagagctggcatgtgccaacaaagtctctcatcctggctccagagttggctgaggagagaaatttgtggaagcctctgtaagtggaggattgttcttggctttggcttttgtgtggctggatatggagtagggagggagcttggacctggtctctggggtgtaggcatttccctgagaggaggattttttttcctttccttgttttattttttcctccctgtccttcccttagtgttaacatttcaaggtacaggaaatgattggatactgattgttttataactctcttaggacagcctattaatattctgctgccaagacgacagtcaggaggaatttaggtagaatcaaggctcataacctttatgaaaataccctaagcagggaaccttcaatttattttgaagtgtttgagttttactaaaagcccatcattgccagtgtggttttttaaaatggacagccatagtggctaaggagaccagtaagacctggagttggcagcagagtgagccttctgaggaaaaaaggaagaggaatattggtgtgggaaagaggtgcagctgtgccactggatccctgtcccttcattattctttactggccctggcagctgtcaaagtttgcttaatagagttgtgggctggagattgtttcttaatccctgtataggagtaccaagctccagctgtgttatctaggctctggggccctagcacttggccaactaatgctgaggcatctggtgactcgagacaaaagcctattatgtcagagagaagattgggcaaagcacaagcattgttatctctaatgcccccrgggcaaactctgtacttggcaagtgagaatgccttgaccttgtgagtttacagcaacctgtccactcggttttctgtttctttgagattattttctactaacgaggtttcagcattctggcattgaaatctataagtgctttattgtaaagaatttggaaaattcagaaaagtaaaaggaagaacataaaaattgtacttcattctaccagattcttaagagaagaatttctttaatgttgtggaactggctgagattattggttcaggactggcttgggcatgatctatacctcatgaatctcaactctgtccctttaagcatctttaattttcccattagagatctgaactggtttggccctgcttggctagattttattacaattgatgtgatctcaccctggagtatgaaactcatcttctttgtttagstttttataacttatctcaaaccaattttttatcttcatttgtgattgtcttcagaagtctgggtgtttgttttttttaaactgatggtggtgagtatgtagggagagagtagttttgcaatttttaaagacttaatgttgacctgctttcttctctttggaaagaggtgtctgtgatgtcagttaacataatttgctttcgttgatgagcttgctcaagacataagcttatgagatttctagttgtataaaaagaaaagggctgtctttcatgttttcttttccttgctggagtagcattttagttaaggaagttgcacaaaaagaaacccatcttttttctgtgtaattttctatatggatttctatgttgaccagtctagaccttttgtctattcgatgtttacatagatgtttagatttaacttttaatacattgtggttaaaaaaaaaaaaaaaggaaattttggtgcaatagagaaaagtattttggatttatttattgytccttttaaatgttaaaatgaggcaggaatacagtacttgcagcctattgtctaagagtactctttgacatttataatatcaggtataagcatttccaaaagagatcttccttaacataccatacccttaatgatcttttgacaggacagaaatggggagagatgttagcagggtatattttaatttatattctccaaaagtatacatcctatactatgatgaattattatagattttattttcatgtaatatggactcccttgcataactggagagaaacagcttccaattaaagtaattatgctagcagctctgagactactctttggaactgttgtcagcactttggtttgaagaaatcagaccaggattgactgcctaatagtaggcttttaccaagagcctgacataagaatttcaggaaatctaggaaaatctttgaaaatctgctatattataggccgggcacagtggctcaaatctgtaatcccagcacttcgggaggctgaggcgggaggatcaggagttcgacaccagcctggccaacatcgtgaaaccctgtctctaaaaatacaaaaattagccagatgtggtgatgcacacttgtaatcccagctacttgggaagctgaggtgggaggatcgcttgaacctgggaggcagagattgaagtgagcagagatcacgccactgcactccagcctgggcaacagagcaagactccatctcaaaaaaaaaaaagaaaagaaaatcttctatgttataaacttaaatttcatgtgaatggaagattgagaaatgatggctgatggcctaagctctgggtagaatttcaactttttgcatgtttatcaaatggctttaatgttcctgccttttcctggttattatttaaaaaaaagtaatgtttccagaaaccatttaacaactgataactggaaaattttttggaagaggttagctagacaggttatacgggttttttttttttcctcatacagtttttttaaaaattgagaaataattcatgttttctttttttttttcagtatacaattcagtggtttatactatattcacaaactgtgtacccatcacatcactaattccagaatattttcatctcctcaaaaagaaaccctgtacccatcagcagtcaccctaattcttcattttacttagccccgggcagtctacttctgtctctctagaaatttcatgtaaatggaatcatacaatctgtggcctttggccgggcgcagtggctcacgcctgtaatcccagcactttgggaggccaaggcaggcagatcacaaggtcaggagttcgataccagcctgaccaacatggtgaaaccctgtctctactaaaaatacaaaaattagctgggcgtggtggcacatgcctgtagtcccagctacttgggaggctgaggcaggagaattgcttgaacccgggaggtggaggttgcaatgaggcaagattgcgtcattgcactccagtctgggagacagagcaagactccatctcaaaaaaaaaaaaaaaggggggggccttttgtgtctgactcctttcacttagcataatctattgtagcatgtatcagtactccattcctttttatggttgaataatattccattatataaatataccacatttgtttatccatttcatcaggtgagggatatttgggttttttccttattttgactgttaatggataatgctgctatgaacattcatatacaagtttttgtatggacatatgtcttcagttttttttattatatacctagggatagaattgctggattatgtggtaactctttgtttaactttgtttggagctggcaaactgtttgccagaatgtaaatggctgtgccattttacattcccgctagcagtgtacaaggattccaatttccccacactttcaacaatacttgttattgttcatttgtttaataatagccatcctggtgggtgtaaagtggtatcttgtggttttgacttggatttctttaatgactaatgattcagaacatcttttcatgtgcttatgtgcttgtatatcttctttgaagatatctgattctttgtcaatattttaattaggttctttgtaagaatatattctggatactagtgttttctaagatttttatggttatagctcttacatttaggtatttgatccattttgagttaatttttctatatggtgtgaagtagggatccagctttaktcttttacatgtacatatgcggttttcctagcaccaatygttgaaaagactattcttaccccacattgaattttcttgacacccttgttgaaaattaattgaccataaatgtatgggtttttatctagactctcagttttgttccgttgatcaacatatctatccttatggcagtattacaatcttgattactcatctttgtagtaagtgttgagaattgtgagtctttcaactttattcttctttttgagatcgttttggctattctgagtcctttgcatttccatacaaattttaggatcagcttgtcaatttctgcaagaagcaggctaggattttgatggagattgtattgaatctgtcagtcagtttggagagttctgcaatcttaacaataaaaaatcttccaatccatgaacatgagatgtctttccatttatttataacttctttaatttccatcaatgatgttttgtggttttagtgtacaaatcttgccctttttcttttttttttttgagacagagtctcactctgtccaccaggcaggggtacagtggcacagtcttggcttggatcactgcaacctccacccaccagtttcaagcgattctcctgtttcagcctcccaaataactgggactacaggtgcacgccactaagcccagctaattttttgtatttttagtagagctcgggtttcaccatgttggccaggctggtttccaactcctggcctcgagtgatctgcctgcctaggcctcccaaagtgccgggattacaagcatgagctaccacgctcagccctgttttttcttttctttttttttttttttttaagccagtcaaatttaggggttgtacaccaaaatcttgcacttcttttgttaaatttattcctgaggattttattcttttagatgttattttaaatggaattgttttcttgatttcatatttggattattcattgctagagtacagaaatactattgttttatatgtactgatcttgtatctcaccaccttgtggaattcgtttgttggctctgatatgatttttgtgcattccttaggattttctatatatgagatcatgttatctgcaaattgagatccttttacttcttacttacaacctcgatgtcttttttctttatttcttgtctaatttttctagctataacctccagtacaatgttgaatagaagtggcaagaacagacatccttaacttcttcactgattttagggagtaactttcagtcttaattattaaatatgatgttaattaactgtggacttttttatagatgacttctatgaatatgggatttttttttttcttagagatggggtcttgccctgtcacccaggctggagtgcagtggcacaatcacagcttactgcaatggcataatcacagcccactgcatccttgacctcccaggctcaagcaatcctcctgcctcagccttgcaagtagctgggactacagacacatgccaccacatgtggctatttttgttgttgttttttgtagacacagggtttcactatgttgcccaggctgcccagtctagtctcaaactcttgggctcaaatgatcatcccacctcggcaatcccaaagtgctgggattacaggcataaagcaccgtacccagcccaatatgagattttgaagggaacatttatactgtagttagagattttaaattatgttgatatttttcagaacaagataattcttgaggaacaggtgaggaaggaggctggagaaacctctggaatgtaaagcacacaagattgagagcacctagcttctagtgtccattcccctacttaagctgaataacattggaaattctgtttaattctttgggcttccttcattcatgctttctgttcatcacatatttattgatcatctagtttgccaggtattttgaggatgcagggttaaaagactaacggctatctgagtcgttgtcgtcagatatcagctacactccatttccaacgtcttttttttttttttcttctgtaaagatggaggtgatgggcatatttgatttgtggggacatgttacggccctgcttattttcagagttcagtatattctcagtgttaagaccagccttacacataagatggcatgagtgctacctatgtgtcagtctcttacacaattattatttcaaagtactgtagttatagcagtgactcccaaatatccattccctgccctgacatctttactaaatttgaccatgatttccagttgcctaacagatttccttgcttagttgtcccaaatgtacttcaaattcacaaagttcaaagaaaaatcataatttgtccctaaagtccacctctctccattcctttctccagwactttctcagtgttagtactgggaatacttctgcccagtcacccaaactagaaacttgtgagtcatctttgatgcctttccctcactgctcacatctggtrcatcacaaaggttctttaagagactatctcctgcttatctcttgtaacttcccctctttatacttgttgccacttcctttgttcagaccctcatcatttttaacctggaccaaactctactcttaccccctttctttcccacttgtcattcaggatccaacttaaatatcactttctctttacagcatattcttgttagccagttgctcagacttccgaatgaagttaaacacctattaattttatagaaatattgaatattatataggggttaatagcacaaattatagaattatgcaggcttgagtttgaatcctggctcctttttttttttgagttggagtctcgctctgttgcccaggctggagtgcagtgacgcgatctcggctcactgcaacctccacctcctgggttcaagcgattctgctgcctcagcctcctgagtaggtgggactacaggtgcgtgccaccacgcccagctaatttttgaattttttagtagagatggggtttcaccatattagccaggctggtctcgaactcctgacctcttgatccagaatcctggctcttttttattggtgggggttttaaaaaaatttattattattattattattattatttttaattttttgtgggtttttttattgtttaatttcttgtttgtttgttttttgtttttttggctgagcacaaggcactttattgatggtacatgacaaggtggggcaccctaggcccctccctctccaaggggtctgcatggaaactgtgaggaggggagattcagcttggtgggggactgattatggcagggactccccagcagtaagagcttctgtcttcctctcatgctgtcgctgggctggtggtccaggggtcttactccttggaggcattgtgggccatgaggtgcaccaccctgttgctgtagccaaattcattgtcataccaggaaattagcttgacagagtggtccttgaggacaatggctgccccagcatcgaaggtagaagagtgggtgttgctgttgaagtcgaaggagaccatctggtgctcattgtagcccaggatgctcttgagggggccctccgatgcctacttcaccaccttcttgatgtcatcatattggcaggtttttccagacgacaggtcaggtccgccactgacacattggcagtggggacatggaaggccatgccagtgagcttcccgttcagctcagggatgaccttacccacaggcttggcagcgccagtagagacagggatgatgtcctggagagccctgcagccatcacgtgacagtttcccggaggggccatttatagtctgggtggcagtgatggtgtgaactgtggtcatgaatccttctatgataccaaagttgtcatggatgaccttggctggggcgctaagcagttggtgatgcaggaggcattgctgacgatcttgaggctgttgtcatacttctcatggttcacgcccatcacaaacatgggggcatcaacagagaggacagagatgttgacccttttggctcccccctgcaagtgagccccagccttctccatggtggtgaagacaccagtgaactctacgacgtactcagcgccagcatcaccccatttgattttggagggatcttggtcctggaaaatgggtgatggggtttccattgatgacaagcgtcccgttctcagccttgacggtgccatggaatttgccatgtgtagaatcatacaggaacatgtagaccatgtagttgaggtcaatgaaggggtcattgatggcaacaatatccactttaccagagttaaaagcagtcatggtgcaccaggcacccagtacgaccaaatctgttgactctgaccttcaccttacccatggtgtctcagggatgcagctgccaatgcgagagaatatgtggctgtctgtcgaacaggaggagcagagacttttttgagacggagtttcactcttgttacccaggctggagtgcaatggtgcaacctcggctcaccacaacctctgcctcctgggtttgagtgattctcctgcctcagcctcctgcgtagctgggattacaggcatgcgtcaccacgcctggctaattttgtatttttagtagagacggggtttttccatgttggtcaggctggtcttgaactgccgacctcaggtgatccacccacctcggcctcccaaagtgctgggattacaaggcgtgagccactgcacctggccttggtttttttttaaactctgtcaccctgtctggagtgcagtggtgtgatctcggctcactgcaacctctgcctcccagggtcaagtgattctcccatctcagcctcccgactagctgggactacaggcccatgccaccacgcctggctaatttttgtattttttggtagagatggggtttcatcatgttggccaggctggtctcaaactcctgacctcaagtgatccgcttgcctctcaaagtgctgggattacaggcatgagccaccgtgctgggcctgaatcctagctcctaatagctgtgtgactttgagcatattacctagcctctgggcctcagtttccttttatctgtaaagtaacactgataactactttatagagcagaagtgaagattaaatgcaattacaaaggttataattatactatcacggctacaatatattgaacatacattatttgctaatcactgtgctaagtataatacttgatacttattgcccatggaaagtagttagctcaatgcttaatattagtagggattcaataaacaaaagctagtattttctgtgtggtcttcttccattcttagcatcttaagggcaagaacgatgtcttatctttgtgactgacagtatggtagataacaataaacagttgttgagtttgaatttatttaatgggatttgagtaactgccaagaggtcttcagtataatattccctgctaacttgactgcagttcctttggaattgaaggttttgagttttctattaaagtatacatacccctagagagaagtaatactttgagctattatcaacagccatcttaaggaaattagttgtttatcagctgctttcaaatctgagaaagaccttgcaggatgagacttgggtaggaaagaaagaagatgggaaagagacctgagctcacaatatcatgtgtaacaaaatcacttyttcctatttgcctcagaattactctttttcctaatttgtaatgtatatcattccacttaacatacatgtactgcatttaatacctatagctctcctgtgggaccatggaattagatcagcagaaatgagtcatttccattacttgaattacttaggttatttagcactttgtgatattatgggcaagatggcagattcactccctatgtagttaatagctttatattgagtactgagaggatattctagacctggtccctaattttggccagctattttggccaaattaatgtcagttatcagctgccctatgaactgcccagaggattgctgaatacaagatgagatgataaacctaaaaacactgaaaaagctacacaaatgcaaagtggattattccagacattattattattattatttgggacagtctcgctctgtcacccaggctgcagtgcagtggcgacaatcatggctcactgcaacttccgccttctgggttcaagtgatccttccacctcagcctaccaagtagctgggactacaaatgtgagccaccatgcccagctaattttttatattttttgtggagacggggtctccctatgttgcccaggcgggtcttgaactcctgagctcaagaacttcccacctcagcctcccaaagtgctgggattagaaatttgagccattgtgcccagccttatttcagactttaacacatgaccttggaaaacgcaatgttgtgggcctcagtttcctcatctctaaaatgaaagacttgggaaaaaaaattacttccaacacccttgtcaactctaacattcttagaaattccattctctctctttctaacctatgtcccttgcttccatatagtctgttcttagcacagcagccaaaatgattctttgaaacttgtccattcattatcacttctttgctcagaaccctccattggctcttaatttcattcagagaaaaagtcaatgatccacatgatctgtgcttctctctgccatacctctatggccttatctcctatttctccctactagcatgcccctccagccctactggattctgctgttccttgaaatgcagctcctcttgccttaggtctcttacatcgaaggttctggctactagaattcttttatcacagagaagtacgtagcatggccaactccctcatctctctcaagtcttcactcaaatgtcaacctatttgaaatttgcaaccacctctgtaccctccttttatcctatcccattattttttctcgaagcactaatctttttaatttactatgtgtatactttattatgcttattgtttattatctatctgctagaatgtaaactctaccaaggcagagattttgttttcttttgttttgctttgtgaatctttgtttctcaagcacctataatagtacctggcccaataaatatttattaaacatatgaatgaaatgtgcagtatggtaaatactaatctcatttttagctgatgtgagcctcagttgactgatttatgaaatgctggttttgttctctgtcttttttgttagaggcattcctcagatatctggtagtacttggttgtctgctcacgttttaaacatctttaagatggagcgctgaaagttatatttgaagctgtgagtgcatttgcaggacatctttatggtgagcttcacagcgagatgactgttaagttgggaaaccccagatgtcaagatcgttaggtgtttccttataggcttaccagatttcttagaaaaataacaagccccttccaatcctcctggagagtaaagatttctttgagctaggtgaaaaagaggactggggcttcagccttcagcattcagtatgtttaaatccacatttaatctccttattttaggtacggtactcatgtcctccactattcctggagcaccctggtccagagatcctctatttgagctttctctatttgagaaactagcctctctagtttttttgggtcgggggtggtatgtgagtgagaaaaggaattaaataaataattgctgcttttttttttttgagacagagtctgctctgtcaccaaggctggagtgcagtggcgcaatcttggctgactgcaacctctacctcccacgtttaagcgatcttcctgcctcagcctcctgagtagctggggccacaagtgtttgccaccacgcctggctaatgtttgtatttttagtagagatggggttccatcatgttgtccaggctggtctcgaactcatgggctcaagccatctgcccgtctcagccctcccaaagtactgggattacaggcatgagccactgtgcccagccataattgcttcttatatagttttcaatcagtgttattcatcctaaatcattgatttcacatcatctggtactgccagttactgagcttttaggggaagattctgtagtgttgattggtatagttcaaagttttttctgttgcatgcttattattcaatatagcgttcttaggtttgcttagtcagttatcattccttcatttgctttccacgttccaaaatattgttgtctcctctctagttcatccccctccttgtgggtttaagtcttttaaaattctttattgtttcagtgtggtttttgtctactctatttattgcaactattttcttgtttcccatttttcttgtttgctttcaattgacagttttattgagataactagaatcacatgtagtttcataaaataatacagagagatcccttgtacattttacccaatttcctccaatagcagcattttccaaaactagtgtaacagccaggtaatgggcattgatacagtccatcaatcttactcagatttgccttgttttgcttgttcatgtctgcgtatgtgtcgttatttccatacaattttatatcacgtgtaggtttctctttccacaccactgtcaagattttgaacagttccatcaacacagcaatcactgttattaacctttttttttttttttgagatggagtttcactcttgttgcccaggctggagtgcaatggcacaacctcagctcaccgcaacctctgcctcccgggttgaagcgattatcctccctcagcctcccgagtagctgggattacaggcatgcactgccacacccggctaattttatatttttagtagagacggggtttctccatgttggtcaggctggtcttgaactcccgacctcaggtgatccacccacctcggcctcccaaagtggtggtattacaggcgtgagccaccacacccagcattatttattttttttttttaagatagagtctcgctctgtcgcccaggctggagtgcagtggtgtgatctgggcccactgctgcaacctccgcctcccgggttcaagcgattctcctgcctcagcctcccaagtagctgggattgtaggcatgcgccaccatgcctggctactttttgtatttttagtaaagatggggtttcaccgtgttggccaggctggcctcgaactcctgaccttaggtgatctgcccaccttggcctcccaaagtgctgggatcataggcatgagccaccgcgcctggccgtgttaacttttttataccatacccactttccctgcacatgtgaacacagtatattcccacctccatccctaatctcttgtaaccactaacctgttctccatttcaaaaattttgttatataaaaactgttatttaggcccggtgcagtggctcacacctgtaatcccagcactttgggaggccaaggtgggtggatgacttgaggtcatgagattgagaccagtctgcccaacgtggtgaaaccctatctccactaaaaatacaaaaattagacgggcatggtggcatgagcctgtaatcccagctactcaggaggctaagtcaggagaattgcttgaacctgggaggcagaggttgcagtgagccgagatcatgccattgtactctgcacttcagcttgggcgacagagtgaaactccgtctccaaaaaaaaaaaactgttatttatataaatatgtaaagtgaaacagggtctctgtcacccaggcttgagtgcagtgatgtgatcatagtttacagtaaccttgaactcctagcctcaaactatcctcctgcctcaacctcccaagtagctaggcgcatgccaccacccctgattaatttttaaaattttttgtagatatgaggtcttgctatgttgcccgggctggtctggaactcctggcctcaaatgattatcctgcctctacctctcatagcactgggattacagtcatgagcctggacaaaaatgttatataaattgaatcgtaccatatgtaaccttctgggattggctttttcaatcagcataattttctggagattcatccaggttgttgcgtgtatcaatagttcattcctttttgttgctgaacggtagtattccatggtatagatataccacagtttgttttaccatatacgtgttggaggtgagctgggctgtttctagtttgggactattatgaaaaaaaatggctatgcacatttatatacagttttttgtgtgtgtgtgaacataagttttcatttctctgggacaagtgcccaagagtgcagttgctgggtcatatggtaattgtgtttagttttttaagaaactggttttcagagtgactataccattttacattaccaccagcaaatgtgtgagaaatctagtttctttgcatccttgccaatatttactgttatctctattttttattttagctatcctggcaggtatgtaatggtacctcaatgtggttttaatttgcatttctctaatgataacagtgttcaagttattttcgtgtgcttgtttatcacctgtgtattctcttcagtgaatcatctggatgtcttttgcccactttctttttttttcatttttattattttcattaatttttttctttggccactggaataaagactcaccattttctaactgagtgatgttttttaaatatatattttttagagacagggtctcactctgtggcacagagtgccattgtagctttgaactcctcagctcaagctgtcctcccgcctcagcctcatgagtagctagtactacaggcacatgccactacacctggctaatttttttatttgtttgtggagacagggtcttactatgttgctgaggctggtgtttaactcctggactgcagtgaccctctcatctcagcctcccaaagtgttgggattacaggcatgcgcccctgtgcccagcctatggcatgattttagaagtggtttatgactgtatagcctcttcctgttcttgcttgttttctgagcctgattctccagacttcctgggaattcagtgagtcacccactactaacctttcatcttttgcttgaatcaactagggttcgtttctgtatgcaactagggaccttgagttatatagtttctgaattttgagagtaaaaaccacaatacatattaaagaagtgcaccatctaaccagggagatgggacttaatgaaatactagaactggccgggctcagtggcacatgtctgtaatcccagcactttgggaggccgaggcaggaggatcactagagctaaggagttcgagatcagcctgggcaacctagcaagacctcgtctctactaaaattccaccccccccccaaaaaaaaaattagctggcaggcaaggtggcatgcaggcctgtcccatttactcagtgccagctactctgggggctgaggtgcaaggactgcttgagcctggaaggttgaggctgcagtgagccggaattgtgccactgcactccagcctgggcgacagagagagaccctgtctcaaaaaagaaaaaaaaaaaaaaaaaaaaaaggccgggcacggtggctcacgcctgtaatcccagcactttgggaggccatggtgggcggatcacctgaggtcaggagtttgagaccagcctggctaacatggcgaaaccccgtctctactaaaaatacaaaaattagccaggtgtggtggtgggcagttgtaatcccagctactcgggaggctgaggcaggagaatcacttgaacctgggaggtggagattacagtgagtcgagatcgtgccactgcactccagcctgggtaacagagtgagactcgctgggtgcggtggttcacacctgtaatcccagcactttgggaggccgaagcgggtggatcacctgaggttgggagttcgagaccaccctaaccaacatggagaaaccccatctctactaaaaatacatacaaaattagccgggtgtggtggcacatgcctgtaatcccagctactcgggaggctgagccaggagaatggcttgaacccaggaggcggagcttgcggtgagccggggatcatgccattgcactccagcctgggcaacaagagtgaaactctgtctcaaaaaaaaaaaaagaaaaagaaaaaaaagagcagagtgagactccatcaaaaaaaagaaaaaagaaaaaaaatactagagctgtattacacagaaatgtgatagcttatctaacacagacaagtgatayaaataaaggggaaattaatggctggagcatgtggaacaggtttatagaaaaactggatgcaaaaatttacatagaaagaagaagtgtttatatactgtggccctttggcagaacacaaactgtaatatgattgttttgcccccttaggggcactatcttcttcattgaaaatgtatatcctagggctgggcgcggtggctctcgcctgtaatcccagcactttgcaaaggaggctgaggtgggcggatcacctgaggccaggagttggagaccagccttaccaacatggagaaaccccgtctctactaaaaatacaaaaaaaaaattagccaggcatggtggcgcatgcctgtaatcccagctactcgggaggctgaggtgggagaattgcttgaacctgggaggcggaagttgcggtgagccgagatcgcgccattgcactccagcctgggcaacaggagcaaaactccatctcaaaaaaaaaaaagaaagaaagaaaatgtatatcctaggatgttctagttaggttaatctctttcctttgttgcattaggaggtgaaaaaaatttttagatgggttagatttccctcaaaaatatttctagtgataagatgttcaaatagtatattgaggtctaatgctagatcaaaaagtcagttgctaagacacttgatgtcacaaactgttaaccatcctggcattttaagcttttgagaaatgtaaaataattcttctccactaaaatgtttgaggcttttgctttagtttatagactggtttattatacagtttatttgtaaatttggctcatcatagaatgtattagtaaatttgtccataggcagaagccagagagtttagtttttaaaagttttatctgtaaagtgtggatttttgtttggttttatttattatttatttttatttttttgagagagagtttcactcttgttgcacaggctggggtgcagtggggcgatcttggctcaccgcaacctccgcctcctgggttcaagcgattctcttgcctcagcctcctgagtagctgggattacaggcatgcacaatcacgcctggctaattttgtatttttagtagagacggggtttctccatgttagtcaggctggtcttgaactcccgacctcaagtgatccactgcctcgacctcccaaagtgctgggattacagacgtgagccactgtgctggactggttttattttttatagagataaaataaaacccaggctagagtgcagtggtgtgatcatagttcactgcagcctggaattcctgggctcacgcaatcgtcccgcttcagcctcctgagtagctggggctacatgcatgcaccaccatgcctgactggtttttgtacatttttcttttgagatggagtcttgttctgtcacccaggctggagtgcagtggcgcgatcttggctcactgcaacctccgcctcccaggttcaagtgattctcctgcctcaacctcccaagtagctgagactgcaggcgcctgccaccatgccttatttatttatttatttatttatttatttatttatttatttattattttttattttgttttgagatggagtctcactctgttgcccaggctggagtgcagtggcgcgatctcggctcactgcaagctccacctcccaggttcaccccattctcctgcctcagcctcccaagtagctgggaccacaggcacccgccaccacgcccggctaattttttgtatttttagtagagacggggtttcaccatgttagccaggatggtctcgatctcctgaccgcgtgatccacccgccttggcctccccaagtgctgggattacaggcgtgagccactgcgcctggccaatttttttatttttgagacagagtctcactctgtcacccaggctggagtgcagtggcacaatctcagctcactgcaacctccgactccccggttcaagcgattctcctgcctcagccttcggagtagctgggattacaggcgcctgccaccattcccggctaatttttgtatttttagtagagacagtgtttcactatgttgtccaggctggtctcgaactcctgaccatgtgcctcagtctcccaaagtgctgggattacaggcctgagccactacgcccagcctacctgcctaatttttgtatttttagtagtgacagggtttcgccrtgttggccaggctggtctcaaactcctgaccccagatgatcagcccgccctggcctcccaaagtgctgggattacgggcctgagccactgcgcccagccttttttccttatttttgtagagatagggtcccaccatcttgcccaggctggtctcgcactcttgggctcacgtgatcctcttgccacacacctcccaaagtggtgggattacaggtgtgaaccagcttacctggccaagagttttattactagctggattatgatgttagccygttgtgtatcttctatatcttatgttaggattcttttctcccatcttcccgcatcttcatcttttcttccccacagcatattcttggagagaaaggagtaggcaggagtttgctatttgaaggcaagtagggagagagatgtggggaggctggtcaaaagaggaaactcaagtttaaagcaatgaaacaccaacactaacttctttttcgaagttgctgatggctttgtgtttagtaatccagattaggtcatgaatcttttgatacagataggtttttttgtgtgttttgttttttatttttgtttttgtttggtacggagtctcactctgtcacctcggctggagtgcagtggtgcaatcttgactcattgcaacctccgcctcctgggttcaagtgattctcctgctttagcctcccaagtagctgggactacaggtgcgtgccactgtgcccagctaatttttgtattttttagtagagacggggtttcaccatgttggccagcgtggtcttgaaccctttacctcgtgatccgcacgcctcggcctgccaaagtgctgggattacaggtgtgagataccgtgtccggccannnnnnnnnnnnnnnnnnnnataccgtgtccggccacagataggtttttaaaatgtagattaaaaaaacctttgtgtctggctgggcgcggtggctcacgcctgtaatcccagcactttgggaggctgaggtgggcggatcacgaggtcaagagatcgagaccattctggccaacatggtgaaaccctgtctctactaaaaatacaaaaattagctgggcatggtggcatgcacctgtagtcccagctacttgggaggctgaggcaggagaatcgcttgaacccgggaggcggagcttgcagtgagccgggatcgcgccactgcactccagcctgggcgacagagtaagactctgtctcaaaaaaaaaaaaaaaaaaaacttttgtgtctaacagcaaaacaaaatccatctttgtttccttcctcttctccatcatataggaaatatggaaaagcagaaaagaattgcgtttttctggccgggcgcggtggctcacgcctgtaatcccagcactttgggaggctgaggccggcggatcacgaggtcaggagatcgagaccatcctggctaacacggtgaaaccccgtctctactaaaaatacaaaacattrgccgggcgtggtgtcgggcgcctgtagtccccgctactcgggaggctgaggcaggagaatggcgtgaacccgggaggcggagctcgcagtgagccgagatcgcgccactgcactccagcctgggcgacagagcgagactccgtctcaaaaaaaaaaaaaaaaaaagaattgcatttttctgaaaagagaataattggcagagtggtacacttgctagtgaattacagtgggactataactgattctagagaaaagagattgttgtttaagtagaattccgccgggtgccgtggctcatgcctgtaatcccaacactttgggaggccagggygggcagatcacgaggtcaggagatcgagaccatcctggctaacacagtgaaaccccgtctctactaaaaatacaaamaattagccgggcctcgtggtgggcgcctgtagtcccagctactcaggaggctgaggcaggagaatggcgtgaacccgggaggcagagcttgcagtgagccgagatcgtgccactgcacgccagcctgggcgacagagcgagactccaactcaaaaaaaaaaaaaaaaaaaaaaaaagtagaatttcttctcttgcccttcccttttggcttctactatttacttaactgaaacttaacgagtccattttttcctttctcttccttccctttctcttcagtggatctgtttcttccctttaaaaaataggttgagttgggcatggtagtatagacctgtaattccagctattcagggaggctgaagcaggaggatcacttgatgccaggagtttgagaccagtctgggcaacatagggagacccccatctctctcacacacacacacacagacagagtaggtatttctgagaaagttgaacctaaaacctactccccagtagatattttttatgctgtgtgagagtaaggaagcttagaaaatggcctaaaaccactttttctcaaacttggaactttgcatacaatatttatgggcctcttgggcaaaactatagacgtaattttgcctgaatctatttggattatttttcaagtagttaatgtgagggagaaaggcagaaatggtcatctcttccaaggccaattttttctagaacttccttcctgacttaagatttctctgtgttattttctctcatcatcatatggaacttcagctctgtaacactgaaataggatttaaatattgtcacctttcaaatttctgtgcactacactatatttttatattttacattcattatattttaatcagtgcatccaaagttttcattgttcaacctaaacttgattgtctagtgatattccgtatcttgctgatgcttaatgcaccaaccactcaaatgctgaggctgaaacagagaatcatcttagactctccttttcacttattcagaagtcccatgtcctgtggatgattcttctttttaacaatatccaccctccttctctccatccccactttctctgccttagttggaccttaacactttttacctgcatcattccaggttggtcccctggcttctggtctagcatctctccagtccattctctacattgctgccaggtgatctttctaaacattctggattaaattcatataacattgtarattaaattccagttccagtgagaacacatggacacagggaggggaacatcacacactggggcctgtcagcgggtggggggcaaggggagggagagcattaggacaattacctaatccatctgaggcttaaaacctagatgacgggttgataggtgcagcaaaccaccgtgggacgtgtatacctatgtaacaaacctgcacgttctgcacatgtatcccagaacttaaagtaaaatttaaaaaatttaaaaataaatttaaaaattccagtctcttaattttaagacacacagctcttcagaattccatcccagtctgttttttgttgttgctttttttttttttttttttctaatttcatctaccattccttctttatttcagccataccaaagtatggcagttccctaracatgccatgggggttcatactttctgttgtttcatataattgtacctttgtgtatatatacttttttctctgcttaraacacctttccctgcctttttgtttgttttttgcttttttttttttttttaaacggagcctccctctgttgcccaggctgaagtgcagtggcgtgatctcggctcactgcaacctccacctctgggttcaaacgtttctcctgcttcagcctcctgagtagctgggattacaggcgccctgccaccatgcccggctaatttttgtattgttagtagagacggggtttcactgtattggccaggctggtcttgaactsctgaccttgagtgatccacccacctcagcctcccaaagtgctaggattacaggcgtaagccaccacgctcagcctctctgcctttttaaatcaaaaactagttctattttaagaagcaatcaaagttttactctgatgagtttttgtttcccagaacctcatatatgtttgtgtcatagtatttatcacaccatacaatatgatcgaattcttttccacctagattggaagatctttttgaaggcaagtcttgtgttgtctttgccttaggctacacgttacttagcacaacccctggtagtagctgttccataagtgctccttgactgactctcatttatgttaaaaagaaaaaaaatccatacagcagaaaatttttcaactttgaggccaggcatgatagcttacagctataattccagcactttggaggccaaggacggcggatcaccttaggtcaggagtttgagaccagcctggccaacatggtgaaaccccatctctattaaaaaatacaaaaattagccgggcgtggtggcatgcatctgtaatccctgctactcaggaggctgaggcaggagaatcgcttgaacttgggaggcggaggttgcagtgagctgagatcatgccactgccctcagcctgggtgacagagtgagactctgtcctaagaaaagttctcaacttgagcactggactcatttaagtaataatcgttaaaaccaaagcccagcaaaataaaataatttgaaaggacttcagggctgtaatataatttgatgtgctttataggtttgaaagtttttgctaagcagatttatgcagaatgtgattaaaataattttttggctcacagtgtcaaccagacaaatgatgttgaggttagttgctaggctggttctccttcctttatgttgaaacaacaggcagcattcattttagctgatgatgaagacctggtttctcctacagccttatctgaaatgcctttccaaagccagcagtgactgtcaggctgtccagagttctttcaacaggaaaaccaggactcatcccttctcttaactcctctaagctgtcagcaagcgaacccctttttaccaatctagcatgaaagccatgagccaggaatacagggcaggtacattgattgttaaagggcgtttggttttcagtctctggattccaagtcagtgctttctcctctgctgtcagaccatcaagttgtaggtaggtgttgtgctgcatgtttcaagatggcccatagatgctggacaattccagaaagcaatggtttccctattatgagaaaactgtgtacctgtcatttctgccattctgttaagcaggtaaaagagattaagacttgctatttagcaagattaaatgagactagtaccccacttctttcttgaagccgttgtgtctctcctgtctgtacatttagacctttcttttgcaaccagatctacttgttaaaaggtggggaatggggttggcatgatgagaagagtatgcagtatacaggatttttttttttttctttgagacagggtctagctctgtaacccaagcttggagtgcagtggcgtgaccttggctcattgcaaccttcgtctcctgggctcaagccaatctcccacctyaccctcccgagtagctggaactataggctcacgctaccatgcccagctaatgtttgtactttttgtagagatggggtttcaccgtgttgcccaggctggacttgaactcctgagctcaaggaattcacctgcctcagccacccaaagtgctgggattacgggcattagccaacacacttcgccaggatttttaataatccattcatcaaagcatatatctgtataataaaaatcactgattatgagtgtacagattgatgacttttgtgaaatggatgcatctgtttaaccacccccaaaaccaagatgtagaacgttttaatttccccaagttcctttgtgtccctttacagttttctctccctgcccccattgcaatcaaccactaatcttacttccatcattagttttgcctgttctagaatatgtataagagaaatcatacagtgagtacttttttgtgtccagcttctttcacttaatataatctccttggaagttgtctatgttgttgcatttatcagcagtttttttctttttattgctgagtactatttcattgtatagatataccacatttgcttacctgcttaccaccagttggatcatttccaacttctggctattataaataaaggtgtgaacattcatgtacacaaagttttttgtggatagagggttttatttttcttagataaatacatacacatgaaattactggttcacatggtaagtatatatttaactttatgagaaagtggcaaaatgttttcctaagtggttacacgattttatactcttaccagctatgtatgagagttctagttgctgcaaatccttgtcagtacttgatactgtctgttgttttcttttcaagtggctatacatcttagtcactgtgaaggagtacatctctcattgtgattttaatttttcttttttgctttgagacagggcctcactgtgttgcccacatgggaatgcagtggcatgatcactgctcactgcagccttgacctcccaggctcaagtgatcctcccacttcagcctcccaagtagctgggactacaggcatgcaccaccatgcctggctaagattttaatgttccatgtttctttctttttttttttttggagatggtgccttgttctgtcaccagtggtgaccagtggcgaccagtggtgagccctgattgcacaggttggagtgcggtggtgcgatcagggctcaccacagccccaacctcccaggctcaagcaatctttctactttagcctgctgagtagctgggacaacaggtgcatgccactatgcccagctaatttttaaatttttttgtagtgatggggtcttcctacattgcctaagctgttcttgagctcctagactcaagcaatccacctgcctatgtctctcaaagtgctgggattacaggcatgagccacaacaacccagccagtttttcatgtttctttttttttttttttttttgagacagagtctcgccctgtcgcccaggctggagtgcagtggcgtgatcccggctcactgcaagctctgcctcccaggttcacatcattctcctgcctcagcttcccgagtagctgggaccacaggcgcacgccaccacacctggctaaatttttgtatttttagtagagatggggtttcactgtgctagccaggatggtctggatctcctgacctcgtgatccacccacctcggcctcccaaagtgctgggattacaggcatgagccaccgcgcctggcccagtttttcatgtttcttgatgcaaatggtaatttttaaaatttcatttttcatttgtttgctgctagtgtatagaaatgcagttgatttctgtgtatgaccttatatcaatgtcaattagcccttatttctagcagttgttttattttagatttcctaggctttttggagatagtcatggtgttaatattggacttactcaactttagacagtgagaataagatccacatgatctagatgtttggattttttggttttctggatatttgagagccttatctttgtaggtctctgcatgcatgttaggatgacataattgaagtaaaccatgaatataaagtggatgaatacagttgcaataataattctatgtagaattgacatggcagatgggaaacaaggctgctttgccctctgggcttttgaaaaattggaaagtaggccctgtgctctaaagaatgataaaatctggctctggctcataagaagtacttcctaaaaccaggttactcaggaggatgatggaattacctctagccatttgtaaagccacttaccacttttttttttttggacaggtattttgttagtgagtccccaccagtgtaccaggcactgttttagtgcttgggatacatcagtgaacaaaacagtaaaacaaataaacaaacaaaaaaactccctgtttaaattacattctagtggggggaatacataataaatattaagcatgaaaatactgattttttattagtggtgagaagggctctggagaaaaatgaggcaaagcaggaggacgggggtgtagagaaatatattgattttaatacccttgtagattactttttgattaacactggaaagtcatcataaaccaaatagcaggaaaaagtactaattcataattaattattcaatgatgaccctttgatgaggattatctcaagtttacatatgtattccccagtgattcttttctccaactgaattgtctaatttgcaaggaattttttagaagaaatggttccaagcaagctatgctgcgatccctcaaccacaaaagatctaattttcatagaaaaatatttgaattttttcaacagttacaaacacaaagtaggaaacaaaggtcctagccttaccaagttgcataatttctcattttaccatctcacttaggaatggtcaatattatgtttgagaacagtaaagcaaaggaaataaaaaaggtgccacttttgaataattttactcgtgtacactctaacaaaatgtgagatgccaaagaaacaacactacaccagatggctattaaatcaaatgcttttctttacaagtcgatgaatcaatagactctagtgaatgtgctcagttaatagaactgcttaggctgggctaggtggctcatgtctgtaatcctaacactttgggagcctctggtaggcagattgctggagcctaggaattcaagaccagcctggacaacatggcaaaacccatctctacaaaagacaaacaaaaacaaaaattacttgggcatagtagtatgtgcctatattcccagctacttgggaggctaaagtaggacttgagctcaggaggttgaggctgcagtgagctgtgatcttgtcactgcactttagcctgggcaacagaacaagatcctgtctttaaaaaaaagaaagaaagaataataaactgcttacagcccttgaagagaaattcttagagagttatttgttctgcatatatgtcaaaacaacctacttgagatgaaatattcaaaattataaatgaaatcttttaaaaaagatgatacagaaatctttcttctgttcatgtagtggtaatgctggtgcaaagatgggtatatggatataaaggcttcatgtcaagagttcacctgaaaaccctgaaatttaggcacatgaattttttttattccgttttgcataggagaaattcagttttgcctgtaggtctaaattccacattaaattttattttcaaaatggtgaatctaataataataagtacttaaaaataaaatagtacccactgtgtttcaagactgtttttgtttgtttgttttggttttggtttggtttggtttttttgagacggagtttagctcttgtagtccaagctggagtgcaatggcgcaatcttggcttaccacaacctccgcctcccgggttcaagcaattctcctgcctcagcctccagagtagctgggattacaggtgcacaccacctcgcccggctaatctttttttgtatttttagtagaaacagggtttcaccatgtttcaacagctaggctgatccacccaccaaggcctcccaaagtgctgggattacaggcatgagccaccgtgccaagactgttgtaagaagtgtatgtatatttactaatttaatcctcacagttaatgatgtaggtactattaatatcatccccatctacagctgaggaaactgagacatagagcagttaggttattttcccaaggttacattggcagagccaaaattcaaagccaggtaatctggcttcagagtctgtactcgtgtgtgtgtgtgtgagtgagagagagagggagacagggagaaagaaagaaaacacaaataacataaaatttaccatcttaaccattgatttttggtccatgttttttatttttcatttttgggcttaatttaatttatttttgagatgggatctcactctgtcatccaggttggagagcagtggtgcaatcacagctcattgcagcttcagtctcctgtacccaagtgatcctcctacattagtcgcccaagtagttgaaactacaggtatctgtcaccacgccaaactaatttttttcttttcttcatgtttttttaagagacaagggtcttgctatattgcccaggctggagtgccatcacagctcactgcagcctctacttccctcaatggatcctctcacctcagcctcccaagtagctagggctacaggcatgcaccaccacacccagctaatttttttctgtttttttgtagaaatggggtctcacagtgttgtctaggttggtcttgaaatccttggctcaagtgatccacccacctcagcctcccaaagtgctgggattacaggcatgagctgctgtgcccagctgtgtatcttctttgtagaaatatctattcaagtgttttgcccaggtttgaattggggtttgttgttgttattgttgttgttgttgttgttgttgttaaattgtgggagttctttatatattttggatattaatctcttattagatgtatgatttgcaggccaggtatggtggctcatgcctctaatcccagcactctgggaagccaaggcaggaagattgcttgatgccaggagtttaaaaccagcctgggcaacatagcaagaccctgtttttaaaaataaataattaaaaaaaaaaagaggaatagatgaccaggcacagtgactcatgcctgtaatcccagcactttgggaggccaaggtgggcggatcacctgaggtcaccagcctgaccaacatgacgaaaccctgtctctactaaaaatacaaaaattagctgggtgtggtggcacatgcctgtaatcccagctacttgagaggccgagacaggagaatcgcttgaacccaggcagtggaaattgcagtgagccgatgatcgtgccactgcactccagcctgggtgacacagtgagactctgtctcgggaaaaaaaaaaaaaaaaagaaacatgatttgcaaatattttctcccattctgtaggttgtcttcttagtcttctcatgcataagttttcagttttgatgaagtccagtttatctattttaacatttgttacctgtactttttggtgtcttagtcaagaaatcactgccaatccaatgtcaggaagcttttcctgtatgtttttctctaagagttttataattttagcttctacatttaggatggtcccttttttttgtttgttttgaggtgaagtctcactatgttgcccaggctggactcacaactcctaggctcaagcagtactcccacctcggactcctgaatatctgggactataggcatgcactctgcccagctggttcattttgaattaatttttgttatggtataaggtaagggtccagcttttatcttatgacttcttttcatttctgacccattgtttttacctccaagggtacttataccttaattcaaagagttagcataaaggatttagaaaagtagatgtcttgcttggcgcggtggctcacgcctgtaatcccagcactttgggaggccgaggcaggcggataacctgaggtcaggagttcgagaccagcctcaacatggagacaccccgtctctactaaaaatacaaaattagctgggcgtggtagtgcatgcctgtaatcccagctactcgggaggctgaggcaggggaattgcttgaacctgggaagcggaggttatggtgagccgagatcgcgccattgcactccagcctgggcaacaagagtgaaactctgtctcaaaaaaaaaaaaaaaagagagaaaagtagatgtctcagggaagggatgaccatggagagggagaaagacaagagaacagctgatcaatggggcagtgagaacttacacatttattgattaagcttaccttcttatatcgcacgttttgtggcaactaccaaacgtctctactaaaaatacaaaaattagccaggcgtggtggcaggtgcttgtatttccagctactcaggaggctgaggcaggagaatcgcttaaaccaggaggcagaggttgcagtgagccgaggtcgcaccactgcactccagcctgggtgacagagtaagactctgtctcaaaaaaaaaaaaaaaaagttttttcttattttaaattgagttgtttgttttcttattattgtgttttgagagttcttgatacgttgtgcatgtaagtcctttatcagatgtgattagcaaatattttcttccagtctgtggcttgtcttttcattatcagtgataagagaacataagttcttaatttggaagtttagtttatcattgctttcgttaatgggtcatgctttccatatctaaaatctttgtctaacctaaggttacaaaggtattctattttattcctgaagttttgtagttgcaggttatatatttagatctatcatccaactttagttaatttttatatatgttgcaaggtatggattaaaatggttttgttgttgttttggttttttgtttttgagacagagtcttgctctgttgcccagactggagtgcagtgacgcgatcttggctcactgaaacctccgcttctcaggttcaagcagttctgctgcctcagcctcctacaggcacgcaccacgcctggctaatttttctgtttttagtagggacgggattttgctatgttgtcagagtggtctggaactcctgacctcaagcaatccacctgcttcggcctcccaaaatgctggaattacatgcttgagccactgctcccagccattgttgtttttttgaaacaaggtcttgctgtgtggctcaggctggagtgcagtgatgggatcatagctcactgcagccccaaactgctgggcttaagtgatggttggccwcaggctcccaagtagctgggactacaggcacatgcaaccgtgcctgactaatttttttcttttgtagagatggggtttcactatgttgaccaggcaggtctcaaactcctggcctcaagcagtcctcccacctctgcctccccagagtgctgggattacagggcataaggcattgcactcagccaaaatgagtttttaaaatttttggttttgtttatgggtatccagtggtccagcactgtttaaaaaactattctttttctcctgagctgcattttcactttatgaaaaatcagttgaccatttatcatagatgtgtggttctatttctggactctctgatttgtctatcttagttggcattactacatgtcttgattactataactttataataaatgttgaagtcatatgatttaaatctttcaactttgttctttcaaagttatttggctgttatagattatttgtcataaacattttagattcagcttgtccatgccttaaaaaaaaaaaaaaagcctactgggactttaattggaattgcattgaatctatcaataaatatggagagaattgccatcttaacaatattgccctccaatctatgaacacaggttatctctctttcattttaggtctttaagttctctttacaatattttgttttcagtgtgtatattttacacatttttaagtatttcatactttactattttatgttttgaggctattgtaaatggtatttttaaaattcagtttctgaatgtttacgtaataattttttaattttaatttattttttaattttattttttatttttatttttattttattttattttatcttgtgagacagagtctcactctgttgcccaggctggagtgcagtggcgcaatcttggctcactgcaagctccgccttctgggttcacgccattctcctgcctcagcctcccgagtagctgggactacaggcacctgacaccatgcctggctaattttttgtatttttagtagagacggggtttcatcatgttggccaggaaggtctcgatctcctgacctcgtgatccacctgcctcagcctcccaaagtgctgagattacaggcatgagccaccacgcctggcctataaaatttattttcataaagtgatcttatacgctgcaaccatgctaaactgatatatcagttcttagtagcttcttttaagattccatagaatttgctagctagacaatcatgtcattttcagattaggaaagtttaacttcctttccatttagatgccttttatttatttttcttgcctttattgaactcaatagaacctctattactatgctccatagaagtgctaagagtagacatccttaccttattcctgattttaaggggaaagcattccgtttttaccattaaatatgacgttagctgtagttttttcatagattttctttttcggattgagaaagtcctcttctattcctggcgtgttgagtgttttatcaggaatggatgttagattttgccaaatgctctttctgggttatccagataaatacatatacttttaaaaattttagtctcttggcctagcacagtggctcacacctctaatcccagtacttgggaggccaaggcaggcagattgcttgagcccaggagttcaagaccagcctggacaacaagacaaaaccccatctctacaaacaaaacaaaacaaaaccacaaaaattagccgggcagttagactacaggcatgcacctgtagtcccagctactctggaggctgaggggagatcagttgagcccaggaggtccaggctacagtgaaccatgatagtgccactgcattccagactgggcaacagatcaagaccttgcctcaaaaaaaaatctagtctcttactatggtgaattacattgattaaatttcaggtgttcaaacaaatttacattcctggtataaacctcacttgatcatgatttattaacctttttatatattcttggatttgatttgctaatctttaaagaattttccggccaggtgtggtggctcacacctgtaatcccagcactttgggaggccgagacgagtgtatcacctgaggtcaggagttcaagaccagcctggccaacatgctgaaaccccatctccactaaaaatacaaaaattagctgacacagtgatgtgcgcctgtaattccagctacttgggaggctgaggcaggagaatcacttgaacctgggaggcggaggttacggtgagccaagatcacgccattgcactccaacctgagcaacagaacaagacaccatctcaaaaaaaaaaaaaagaattttccaccctgggagaccaaggtgggaggatcgtttgagcccaggagttcaagactggcctaggcaacctagtgatacctcatctctacaaaaaataaaacaaaattagccagctgtggtgacacatgcctgtagtcccagctactccagaggctgagatgggaggatcgcttgagcccaggaggttgaggctgtagtgagccgagatcacgccactgcactccagccttggtgacagagcagcaccctgtctcaaaaatgaataaattgggctgggtgcagtggcgcacgcctgtaatcccagcactttggaggccaaggcgtgtggatcacttgaggccaggagttcgaggccagcctgggcagcatggtgaaacctcgtctctactaaaaatacaaaaattagccgggcatggtgttgcacaactgttgtaatcccagttacttgggaggccgttaagcgaaattctgtctcaaaaaaaaaaaaatagccagatgcagtgctttacgcctgtaatcccagcactttgggaggccaaggcgggcagatcacaaggtcaagtgttcgagaccagcctggccaacatggtgaaaccctgtctctactaagaatacaaaaattagccgggcatggtggtgtgtgcctgtaatcccagctacttgggtggctgaggcaggagaattgcattgcttgaacccaggaggcagaagttgcagtgagccgagattgggccactgcattccagcctgggtgacagagcaagactctgtctcaaaaaaaaaaaaaaaaaaaaaaaaagaaaacctgaagattcagtgaagtatagaaaacagaaatcacccataatcctacatgtagcaataacgcaataactaccttttttttttttttagttggagacagggtctctctctgttgcccaggctgagtacagtggcatgatcacagctcactgcagcttcagcttcccaggctcaagtaatcctcctttcttagcctcccaagtagctgggaccacaggcacacacaccacacctggccaattttttttttttattatttgtagagaaaatgtcttgctatgttgctcaggctggtctcaaactcctgggctcaaacagtcctcttgccttggtctcccaaagtgctgggagtacaggcgtgagccactactcttgggtaattttaaaatttttttatagagactggagcctggcaatgttgcccaggctggtctcgaacacctggtctcaagtgatcttcccgcctcagcttccccaagtgmtaggattacaggcatgaaccactgctcctggccagcacttattttaaatgccagccattattctaaatgcttcatatatatatattagtttatttaaccctcatgacaatcagatattatctatttgcattttatagatgaagaaaccaaatgaaaggttaaataagtgatcagtttcccaaccctaattaaaaatttaacagaaattattgcccttccctcctagccactaaatacttagcactgctttactagtctttcacataatgccagtgtatttagtctgtttgtaatctgttaacaccatgttgaccagttcttggttgttatatacagtgtttaccttccgatttttagcctctgtaatacagttacagcattacctaggtttattgagtttttttatagttactagatttagtgtatacttagttatcagtatttgagggaatttcaaaatattatttatatcctatctgctttttaaaaggatttaatgccatttataataaataagtcatacaatgaacttttcaacattaaagattaaaaaccgtaaagaggaaccaggataattatatccaaaatgtaagctcatttagtaataacaagttaatattaaatttagttcttctttctgacatttttggtaagaatgagattcttggttttggagatagcacagactattagtttgaaattatgggatttggtatgtcacatattattcagaatgctaaaatatctgccactgagcaaacctgaaatgtaattcttttttcttattcttctttttttttttttgacaacttctgataccaaaaaaatgtgtaattctttacataccttctaatagtagatggtcagattttttgtacgtgcagtgatttcaragaacattgaaaaataatcaggaactggttcagtttgcacaaatttactcttctactccttcttctgcacccactaaaaattgtgaaactgtgcagrtgtaataaatatattgtgtgtaggctgaagtatgatacagagtgtgaaactgaaatatttagtccaaatttttattcagcaatgaataaaaattcccagggcaatgaataattctatcgagggctgaaattagtggtggggattggtggaaagagagatggagctcattttatgaagtctcataaatttggcatgaatcttataatcagtgaagagctattaaagactttttgatcagggtagtgtcatgaaattgaattttaggaattttttaggaagctgaatactgttagtggtatatagaaagattttctggttttttttgggacggagtctcgctctgtcgcccaggctggagtgcagtggcgcgatctcggcccagtgcaagctgcgcctcccaggttcacgccgttctcctgcctcagcctcccgagtagctgggactacaggcgcccaccaccgcacctggctaattttttgtattttcagtagagacggggttttactgtggtctcgatctcctgacctcgtgatccgcccgcctcggcctcccaaagtgctgggattacaggcgtgagccaccgcgcccggccgaaagattttcttaaaggagkagataccaggaaatcactttatagtctattggtgtatatcatacatagactattgctttttggtttgttatttactactgtaattcaaggtgtaagtagccccagcttaatatagtttctcataaattttcattcttaacctctcccaagaagctcaccatacttaactctccattattgctgtaccttttttgttctccaaattgtaatacgtacatttctctacctgtcaccctttgatttccccttcccttgccatctcttgccacccctacccccacctcctacctgggttccaatcctggttctgcttaccatgtaactgtggcagtttactttatctctcaaagcctcaatttcctcatctatacaatgtgaataatagtttcagcttcatagggtggttgggagagttattaggtaaatatatggaatactcttaaaataatgcttggcacttaataagtactatrtaagtattgttactgttgtctggctcatatttatttttctgatcttagcttagagtttatatcttccttctgggaagtcctttctgcccaaagctgagttacatattcctctttgtgttgccacagattcctgtgcctcccttgccatgttgtattgtcatagcctaattgtttcattgccacaagttctttttctgcttccatcacatcatcacatccttcttgattggcaaatagtaactactcaataaatatttgttgtytagcacatacatacagttcaaacagaaaactaaaatagactaaagtatgaggaaatcttggtattggaacttaactattgaggtttatttcaaagaattttattttgcagcttcttttgtatagctttgaaactctaaaatatttcctttttttttttttagttgccatttcctttgagtcagcaggcctttyatctggaccttgacccaagaagttatgatttttctcactgtttcactctatctcccagtctgaaatagagcattgcactttttagtgtctgagagatatcatgcctttgcagttaaattctcttctgtggctttggctggaatgtgagtaaatttccagagaggatacataattcccaggctgaactctaaccttgtgaactattttaatgtgtggcctcataaatgtaaattttttaaattttagaccaaggaggtgcttgttgttctgccttaattgcaacttctatttagaaagaaaggatctcttggctttaagatagaatcaagaggtgatagtagtgagactcaagtcctgaagataaaaacagaaagggccaaaagctcacctcttggttaatcaggcaggtgtggaggttatggaaatcctcaaagataaaaagtgcctgatggcagcaaccaaggggaaaggaagattggctgagcccctggggtgtgtagcaaggagaccattggtagccaagttggaatctgagaagcggccctgtagctgaacactagaaaagcctttgcgtgaggtattcccaattctaacatttatttatcaccttctgtgtaccaggttctgtgatcattgttaggaggaatgaaataatgacatagccttctagagaacctcagtatccagcaggaaagatgggcatataatgaataattatattaataactttaataagatcccctaccacctataaactccatgagaacatagaacatgtctgttttgtgtctagcactgagtggtcgctcaataagtatttattgaataaatgaatttgtttagccctttctagtttactatgtgccttcacagatatctcgtttaatattctaccttccttttctattcacccactttgtgatgtaagcaagataaataatagtatccgtagcaataatagtataagacaataaactgagttaaatagaagttaaaatgataaacagagaagggagtaaaataggagcttttgtagctacatcttaatcagatgagttgttatacctctgtccagtatctagagtaattacatacttaccacccttcctcttgtctctctgggttttttttgagactgagtctcgctctgtcaccacgctagagtgcagtggcacaatctcagctcactgaaaactccacctcccaggttcaagtgattctcctgcctcagcctcccgagtagctgggactacaggtgcatgccaccacacctggctaatttttttgtatttttagtagagatggggtttcaccatgttggcctggatggtcttgatctcttgacctcgtgatctgcccgcctcggcctcccaaagtgctgggactacaggtgtgagccaccacacccagcgtctctctggttttttaatttgtttttttttttccccccgcagaagatcctttggttttctactagatgttattccatctagatagtgtttatttattgttcatagtcatctcttacccagggaattccttattttgtattcctgaaatcgaaatattctttcatactcattatttagatgctaagagaaaacttggggaccgctcttcccaacaagattgtctcaaattttgtgcccatctgtgtgcattcacgcacatgagcatgtgtgtggaggagaagaggaaaagaacagagatggaaaagattttgaagtgggatgcttggcaagaggagtaaatagatgataattatgaagaagaaattggcaggatttcttaactgactagattatgggaacaaggagtagagaaacaggtcaaagttggctgaagtccatagaatgtatattttaatttaagtgctaaatttcctccatacatttttcatgaactttgaaaaatttgttggctttatacgaacctgtgaacttcagtgagaaaaacagcatctttatatttttgagcatagtctcaatgtcattaattcttctgcttaaaaatcctcaaatgacttgccaaattaggataaaatctaaattctgttaccaaggccccaaatttctacgtatctgactgcaactgcctacttaaactgatcttaccattattcccattcatataccacccacataggctttatatctgctcttacttaagagtttttatacttcctggtccctcatcctggttgttcctccccagtactcagcttattcagttatcagctcttccatactcctttatctaacgtggtaccctcagtgacttgttatctaacctattactttgttttgttttatttttataacagcacttactactttctgatattgtcatcttgtttgtcagtttttctcttctagagaaatctttgtgagggcaggttcttggctctctactgattacttgagtctccattgcccagccttcttgttgtatcagttttaatatagcaaaccaaaataggatcttaattttaaaaaatagtaatgctacttaagatttgattactcttaagacctagtgtttctgtatgctaactccctttttataatgtaaaatgaattattctctcataatatttttctttcttttcttttctttttcttttttttttttttttttaaatgatttagatggggtctgcctgtgttggcccaggctagccacgaactcctgggcacaggcaatcctcttgcctcagcctcctaaagtgctgggattacaggtgtgagccaccatgcctgggcagtctcataataattttcattcctgactttttttcagatctagtctctagaaagaaacttgtgcataccaagacagtatggccaaaaacctatcctggcaagtgttaatgctatgtttccactcctgaacaccaggaactgaacattgttgtgtttgggtattgtgagtatggaagtcattcaattatttttcaaagcgggcttagtacatgatgttttgttaagctaccttgagaactggagtttgtgtttaagtttcagtgagataagggtagacctcctaatgcctgtgaaaattttgatatattttataatgtaccacctgacatcataatgtactgcctgacatccaaatcatctttttgagttttataaatctccaaacttcaaaactagtagatgctggtataaaacctaataatttcagttcaatctttacattctccagggtccacttttcattctcttaagtacaagcctatttctcagtttggcatagtgccaagaacattgataaatgttggccccaaaatgattgtcaaagttctgttcacttaaattcactgtaattagtaagaatagttatcatttattttgggtgccttcaaagtagactrtgctaggcaacaatttctcttgataatctcacaatagccttggcatttgaagaaactttggcctagaaacatttatgcccccaagatcacacaactagaaagaagcagaagttgatttatctcctaaatctatgtgacttcaaagctggtcatcctaccactatgcctggttgcctatatcatttaatgtgatgaaggcactaatgtgacacccacaccgggctcaatttattagtaatccttctatatcacagccacacaagtgcttagagttcctggctgagatcagtctatataattatattacacttctcaagtttagtagtgctagacaaataggaagggagttttacattctttgtttatttgcaataatttcatgattgtcgtaattaaactatagcccgagtttaaagaagaagccagccaaaaaaaaaaaaattaactcatacattcatccctaaacaatcaaatctcagtaaaaattttaatattagcagcaagttctttttattttctagcagcagcttcttaagagagaggaaaagagggtaagcgtgagtggtgtgtgtgtgtgtgtgtgtgtgtgtgtgtgtctaggagagggggagagcacatatgtcaactaagaggtgagtttacttctgaagtccaattgtctaacgtatggagggaggataacctccaggcttggtggtgcacacctgtagttccagctacttgggaggctgaagtggaaagatcacttgagcctgggggtcaaggctgcagtgagccatgatcacgccactgcactccagcctgggcaatggagcaagaccctgtctcaaaaaataaaaactaaaaaattttagtctgggcatggtggctcacacctgtaatcccagcactttgggaggccaaggtaggaggatcacgtgagcctaagagttcaagacaagcctggggaacatggtaaaatcccatctctacaaaatatacagaaattagccaggtgtggtggcatatgcctgtagtcccagctcctcgggaggctgaggtgggaggattgatggaacccagcaaatcgaggctgcagtgagccatgatcgcatcactgcactccagcctgggtggtggaacaaaaccctgcctcaaaaaaaaaaaaataattgaaaataactgaaaatttaaaagattggcggggcgcagtagctcacgcctgtaatcccggcacttggggaggccgaggtgggtggattacctgaaggtcgggagttcgaggccagcctgaccaacatggagaaaccctgtctctatgaaaaacaaaatttagccgggcatggtggcgcatgcctgtaatcccagctactcaggaggctgaggcaggagaatagcttgaacctaggaggcagaagttgcggtgagccaagatcgcgccattgttccagcctgggcaacgagagcgaaactctgtctcaaaacaaaacaaaacaaaacaaaacaaaacaaaaaaacccatatatatataatatatatgtaatccctcccaaagtggtgggattacaggcgtgagtcgccgtgcccggcctatttatttattttttgagacggagtctcgctctgtcacccaggctggagcgcagtgacacgatctctgctcactgcagcctccacctcctgggttcaagcgattctcctgccttagcctcccgagtagctgggactgcagacaggagccaccacacccggcctaaattttaaattgtgcctcattctgagtagcatgatgaaatcttgcaccatcccaccctgtcccacccaggatgtaaactgttagcctttatctagtatatgcatgttgtatgcgctggctgctacaaagttaggcacttcgtagytgtgttggttatcagatcaaaaaaacagtttatgtaaggttaggtactattcgtggtttcaggtacccaccgggggtcttggaatgtatcctccaaggttaagggtaggggggactactgtaattgcctgaatggctcagaagggagagctgttgtggccagagaagctgcttgttatgtaatccacattagtacaagataatcataagatgagctgtaagtatagtgggtgttagatcactgctgggtcttatttaaggtggcaggggtgttagggtaacatttagaagttgagagcaaagagtaaggtttgttttgactttatacaacacttgaagtaaaaagcagtttgttttgttttcaggcataaagatatccatccatgtgtttgttgtgttgtttttgttttttgtggggttttttttttgtcatattcacaagggaaaccagaatctgtatgttcctctggaaaattaggtgaagagaagtataacctatttcagtgtggcttcagtctatggtctgggttttattaaaccagatacgtataagagcatgtcaaatttaaccacctcccttcatccactagattacagtgaatgatagtaatgtcactgatacattgttatacacattgctcactaactgyttttttttttttttctttttagaaacggagtctcgctctgttgcccaggctggagtgcagtggtgcgatctccgctcactgcaagctccacctcccaggttcacgccattctcctgtctcagcctccctagtagctgggactacaggtgcctgccaccacgcctggctaatttttttgtatttttagtagagacggggttttctttttttttctttttttttttttgagacggagtcttgattctcggtctgtcacccaggctggagtgcagtggcgtgatctctgtttactgcaacctctgcctcctgggttcaagcaattctcctgcctcagcctctcgagtagctgggactacaggcaggtgccaccatgcctggctaatttttgdattattattattattattattattattattattactatttttagtagagacggagtttcaccatgttggccaggctggtcttgaacacctaacctcaggtgatccacccaccttgacctcccaaagtgctgggattataggcatgagccaccacacccagccactaacatcttttatccattaatagttcttaattttgttttgcttgtctttaagtgcttgtccctttactaggataaactaagtactattgataatttacaaaagtgctccatctttactgtttacatctactggctagaatgtctaccaagttatgtaagcatttttgtaaatgaatttattgcctttagttttagaaatattgagagcagaatggaacactgacaatcagatttggcaaaagcattcaaagtgattgttatggtgattctgatcatctctttaagataagggagttaggaagattactagaataagcatctttaatattgagctaagattcatttttgtgttccttaaaattcaccatagttttgactaaactaaggaggacagtgagtacttactttacactgacctatacattcatttaaaagcattctttaattgaagtactttattttattttattttattttattttttgagatagagtctcgttctgtcacccaggctagagtgcagtgatacagtaatggctcactggagcctcaacctcctgggctcaagcaacccttccacatcaacctcttgagtagctggaactaaaggtgtgcaccaccatgcccggctaattttgtttattttttgtagaaacaaggtctcactgtgtgggccaggctggtctcaaactcctgggctcaagcagttctcccgcctcaacctcccaaagtgttgggattacaggcttgagccaccatgcctggcccaattgaggtattttattttagatgcatcttctagccaggcaaggtggctcacacctgwaatcccagtgtcttgggagrctgaggcaggaggattgcttgagcccacgagtttaagactgtagtgagccatgatcatgtgactrcactccagctggggccacagatcgagaccttgtctctaaaatgaatgaatgaatgtatgcatgagcctcctgagaagccatggagaaagaagcaagcatgaccagtcagtgactgacatttaaactgtaagaaaaattgacttcattttatatgaactttaaaggagacactctgtgtaggtaggtacttcaaaatatgtgtaagtgtaattgtatcagaataggtggccatgatgtgatttgatgagactgccaagagctagacattctagccatttcttaaaaggccagttagctaaacactagttaggattcatttatttaattgattcacagcttaaaattaagtgtagtaaaggaaacagatatagaagagatagggaaaggtttagagttggagtgtcttcagctgcttgtggagggcgtggtagagacagtgttaactacttcccagttttaccttgggtgacccttgttacagatcactgcttctgagctgcttttgagagctagtggagagagattatattacgtcctaggagaatgtaactcagttctactggaggccaccattctcttccaggtcatgggtggtacctcttagtgtcactcagaggtgaggactatttgatggcaggcaaccttaagctgctgacaggacagaaacctttgtgataagcattgggaaatctgactcctggaaagagtgaagcatcaaaaactctgtagagtatatgagtttcgcctattaggcagttataaggaaatagctaaaaaggaactggctaattagagttgagagaaaatatttataaacagactttaaatactttaaaagcaggcttttattttatattctttcagtggggatagtgtgaactgccacctcctttaaaaagccttgcattccagctgggcgccatgactcacttctgtaatcccagcactttgggaggccgaggcgtgtggatcatgaggtcaagagatcgagaccatctggccaacatggtgaaacccatctctactaaaaatacaaaaattagctggacgtggtggtgcgcacctgtagtctcagctactctggaggctgaggcaggagaatcgtttgaacccgggaggtggaggttacagttgagccgagatcacaccactgcactctagcctggcgacagagcaagactctgtctcaaaaaaaaaacaaaaaacattccatctaaaaaaattaccatttacttgcagatgttttcttgtggaagaaataaagtttaaagaaaaagaaataaattaccaagacagctttccaaatatgatggattaattatctgtatattgtggcaagatattttccccctcccaacatttattttttatttatttatttattttgagacaggatctcgctcggtcacccaggctgaagtgcagtggcacgatctcggctcactgcgacctctgtctcccgggttcaagcgattctcctgcctcagcctcctgagtagctgggactacagacacgtgccaccacacccgactaattttttgtatttttagtagagacgggatttcagcgtattagccaggatggtctcgatctcctgacatcgtgatctgcccacctcagcctcccaaagtgctgggattacaggcattagccacggtacccggctgagatattttctccctcccaacattttattatgaataattttaaacatacagaaaagttaagtaaaatgatcacccaccacctagattcaataattgtcaaagttttgtcatatttgctttatctatatatgtgattgtatttgttttgctgaacagtttggaggttttaaacattatgacatttctctcccaaatactttatcatgactctccaaaaacatgaggacatttgcttatataactgtaataccattattatactacacagtacttcctactgtcatcttttatccatgtgtagcaagttatttagccacttttaaatttgtttctcctcactccagtaaccctacacccccgaaaaccttattgttccttgtcactttgtcatgtacctcatgcccagcagcaattggtgagatggctttttcatatggttttatatttgggawcctctagagcagtggttctcaacttgggctggacattagaataacttgaggagctcttgaaaatcccaatccccctacatcccagaccacatatatcagaatttctgatattctgatgatttccatgcgtcagtagttcttaaagtttcccaggtgattctggtgtgcatccatgattaagaatcacaactgtaggtcctattaatcttcagtaagagtattcagtgtttggataggtgcttgacagttttctgaccagaacagagatgaaaagtggtatgcctaggtatttaggctttttccttttctttcactgaacatttactgaacatctacaatgtgtaaaacactgagctaggttcccattcataaggatgaataagatatgttaactgtggtgttctagaaaggccatggacttagggttagacttctatggagttaaattctagctttgctgagaacaatttgtgtgatttttaactaagtcctaaacctctctggggctttaacatgatgtggtttgtttaccttgcagatattatcttaaccactcttactacctctgtactctagccacactggccttctttctttttctcaaacatatgaagcttgctctatgtatatatgtggctttttactaccttctttttccactccctctgatacccctctgggatacaaatgggcccttgctagtcattcaggtttcagttaaaatatcatcttctcattgaagcttcttctgaccatctaatctaaaataacttcctggatagtccatatcatatcatggtgtttgattttcattgtggcatttattcctcttagatagtttcttgtttgttatgggcttactttctcctctattatataagagtaccaggagagctagaacctcatctgtttggtttcccttattctcaggaactgtagaaaaatgcctgacacatagaggatgcctaataaatatttgttgaattaataaagtggtaacagtaattctacattatgtttgagatagtttaggaaaacctcctggggacaatttcctatcagttccctcatgctctttccccaaggagtatcttttctcttaaatgctaaaagccaaagcctttgttgtgcttagaaaatccaagcaggtagaagatacttctgaatatgtaaaaagtgtgccaattcagtagccccctccccagactggggttagagggctcccttttgctctcacagtgagtctccttgtgaaaaagaatcaatagttttatcatcttgtcttagcacttctccttctgaacagaaatttgttgttcaacctttgggtttatgctggagaaacagaatgcattgataaaccatccttttgtgtgtatcattgagagccaagatggaagcagtgttagacagctagttaagtttttttctgtagtgtcttttctgagttaaaaagcaaatgcaataaatgcccacagaatgttcttgacttttctttttctttctggtgtatttttttaagctttaatttattgctcttgcactgtgtgccaagaacggaattgcctagatcacatcttacaatatctctatgagataggaactctttctttcttactttttaaaatagagataggggtctcgctatattgcccaggcttgtctcaaactcctgtgctcaagtgatccccctgccttaacttcccaaagtgttgagattacaggcgtgagccactgtgcctgactggccgagagctctcttattcccactttatacatgagcatagtgagttttagcaagctaagaaacgtggcctggttggtggtttgtggagccaggattaaaatccaggtaatctgacttatatcttccacagttataactatactacctctcattatatctttttctcttctcatctttatcatttaaatacttttataaaaggcatttgagatggttaagcataaatatgtttctcaaagcaatagataccaggaaaacagttcctggtggccttgcttwgaagccatgttctaatcaatcaagattcttaaggaaragtagcatcatcaattgttcatgtatattagtagatgagtctggaaagtggaaccaaggttctggacttctttgtttctttaagccttctaattatattttgatgattatggtcaagtatatggattctagtttgtctttagtgagagattcaaaaggagcattgtgtttaattctagaaactcgagatactaatattatcacgatgagttcactcctattattttcatgttatktttttttggattagtaaaattagcttagttttggccaggcgcagtggctcacgcctgttatcccagcactttgggaagccgaggcaggtggatcacctgaggtcaggagttcgagacgagcctggccaacatagcaaaacctcgtctctactaaaaatacaaaaattagccaggtgtggtggcacgcacctgtagtcccagctactcgggaggctgaggcaggagaatcacttgaacctgggaggcggaagttgcagtgagccgggatcatgccactgcactccagccggggcaacagagcgagactctgtctctaaatacataaataaagcatatgatctatatggacagtcatatctttttctttttaaaagtccatgctgatgctagacgtaagagatgatttgcacagagtaagtgctaaggttgataacaaattccttctgtagggtgtttatccaagaggggaaaataggaattctagaggggaagatatgaaacttttgggtatagatccctcagcagagcagaaacacagagggcttaggcacctcataagaagagctaataatactgccactgatcatggtgataataagaaagagagcaaacatttatttactgtttgctaaatatagtgctggcactttaaatgtattatatgaatagattaaatgggttaataaatgtagaatacatagaataatgcctggtgcatggtaaaaagttatataaacagctgctatttttattgkacttttatatttttatataatatatttttattttttaatttttattgttatccttttgggtggtgattgtaattattcttcacagcaaccgtataagttaagtactattattatccattttacatatgggtaaactggatgccagaggttaagccaggaaatagtagaacaggattcaaactctctagttttatgtagttgagtcttttttttcagtcagtctcactctgtcacccaggatcgcccaggctggagggcagtggtgagatcttcactcactgcagcctctgcctcctgggttcaagcagttctcctgcctcagcctcccaagtaggtggggttacaggtgcccaccaccacgcctggataatttttgtatttttttagtagagacaagatttcgccatgttggtcaggctggtctcaaactcctgacctcaagtgatctcacaaagtgctggtattacaggtgtgagcccggccttgagtctttgtttggttaggactgcctagggatatagatagctattctacttagtgttgctggaaagttgcccttaaggaagtgacatttaggctgatactgaaagataaaaagctaggtatgcaaaagttgagaaagggaaagaggaactttaggcaaagtacagcaagtgcaaaggcctgaggggaaatgggtttgacatggttctgtaaacaaaaatgtcaccttctgagtgagttcttccctgaatactgtatttaaaactggccaggtgtggtagctgatgactaattccaacactttgggaagccgaagtaggcagatcgtttgagtctgaaagttcaagaccagcctgggccccattgtgagacctcattctttacaaaaaataaattcgctgggcatggtggcatgtgcctgtagtcccaggtacttgggaggctgagrtgggaggatcacttgagccagggagattgatccctgttttattttctccataacacttattattgtcccacatagtatataatttattttggttgtctctcccacaatgggatataagcttcctgaggacagggatgtttgtctgatttgttcattgttattgccaggtcctcccttagcccatgggactttttccagtaaattagaaaagaatgccaggcacggtggctcacacctgtaaccccagcactttgggaggccaaggcaggcagttcacctgaggtcgggagtttgagaccagcctgaccaacatggagaaaccaccatctccactaaaaatacaaaattagccgggcatggtggcacatgcctgcatacctgtaatcccagctactcaggaagctgaggcaggagaattgcttgaaaccgggaggcggaagttgtggtgagccaagatggtgccattgcactccagcctggacaacaagagcaaaactccgtcttgagaaaaaaaagaaaagaaaagaaagtctcctttccaaaaggttgtggctccacgcgggacacgtagttcggctagaaaagcatggacctagattttggcctcctcttgcctcctcagccaattatacaagacataattgagcaaccattacatggcagtcctaggatgcattcatagtacctagaacagtgccaacgtgtagcagacatgaataaatatttgtagaatgatggaatagtttagagtgaagaagagtgattatgagatgagaaagtaagcagaaaccaggtcaagtaagacttctaaggagtttgatcttttttttttttttcctaaatagcagtcaactgacaagtcccatggaatactttccattaaatcataatctgtattttcaaaaagcagtgcaagtaattytgcagtagagttagtggtccaactttcttttttttttttttttttttttttttttgagacggagtcttgctctgtcgcccaggctggagtgcagtggcgcaatcttggctcactgcaagctccgcctgccgggttcataccattctcctgcctcagcctcccgagtagctgggactacagacacccgccaccatgtctggctaatttaatttttttttttttgtatttttagtagagatggggtttcaccttgttgaggatggtcttgatctcctgacctcgtgatccgcccacctcggcctcccaaaatgctgggattacaggcgtcagccgctgtgcctggctagcaggccaactttcaatacttttggaccttcagggatccatctcctgcctatttcacccttgtctatttggcattttactttgcctgcatatgtgggtttaccatgttctttcaaactctgtgcaagggagtttgggatgaactatatgtaaaatattcatttttttccttgcaaccccaaatccaaacacagttggatggagtttttaatcagggttattgcagaaaacccaggacctcaggtccttgtgattgagtggtgaatgaaggggaaaatgaggccacttgaacattattctgtttaggaacttgctgtatgaattagtagagaccatcacatttttcatcaattcctgctctcaccacaccccgctcttgcccctgctaaaaaactaccagccttctctcatgttatgatttaggggcccctgttcactgaggggctaacagctggaattgtggcactrcattagccttttttgagcttttatttctctttcatgctggattttttttttttttttttttttttggcacccacaccccatttgagaatttactttctctctgaraagtttttgtcagtagttttttgttttattgccttttctgtgataggttaaggatacagcttggtaaagaaggaacctgcaggggtttattgatggagttcctgtcccaccatgccctaggcctagtacatacatgcttctgatgaatcactgctgttagtatttagtatctcctgatcctcatagtccatattatgcaaagcatagaatctgcccaagggacttaatagctgaatcactcacttgatctgttgtctttcactctttcttccctttgttggtggctacaggcaagtatatgagagatataaaactgtaagcaagacaaaatctggactacatatctttattgctgcttgggaagtggcctgggagttcaaattcaaggatttgaagctttgtacagctgccccagataacctgctctcattgggatgaggatgaagtatttccacatgattgctcaagtcccttttctctttgccctgatgccccctccctcctctctatttcattaattgcttagcagttgctgatggaattaaaacgaaatgtgtctgcagcctctgtggtttgctgtcagaactctctttctaaggtctttatcttactgctagggatgggtgaacatctgattttgaagcaagaggagggagggacctgtggctgtagttaaatgcatttttctaaaagcagcagcttgcagagttggactcctcctgaagcactattcattttaccaagccatgccctagtcccttatgctgttcattaatggggcttgtatgtggcagcacagtatatagaaatgaatcctgctgaattgcttttgttggtgatgtggaaagtgcttttcatttttaactaagaacaagaaggaaacagcctcaaagtgtgaaagagtcaaaaccaaatcccggggtttctgtggaagacaagaatctggatatggctgaggcgggtggattacctgacatctggagttcaagaccagcctaaccaacatggagaaaccccgtctctactaaaaatacaaaattatctgggtgtggtggcacatgcctgtattcccagctactcaggaggctgaggcaggaaaatcacttgaacctgggaggcggaggttgcagtgagcctagatcgcaccattgcactccagcctgggcaacaagaactccatttcaaaaaaaaaaaggaagaagaggggaaaaccagaggttatctataatcagtaggatttttttgcacatacagaatttctggcaataataatcttttggacacaggatgggaataacaaccatggaggaacttctgttttcttagggaggtcaacgtatttattttctcttaataccgaattctcttttcttattcatggttttggttttgtgtactattaattatataaattaatgggatcccaggtagtatttgtatatttacaaaaaggttatgaaatttaagcaaggtaaacttaaagatagccacttgaattttgccaaaatttggaacttaatctacattctaaccaagcaagctggttttatctgagaaaatataaataattacttgatatacttggccgggcgaggtggctcacgcctgtaatcccagcactttgggaggccgaggcaggtggatcacggggtcaggaaatcaagaccatcctggctaacgcagtgaaaccccgtctcttctaaaaatacaaaaaattagtcaggcgcggtggcgggcacctgtagtcccagctacttgggaggctgaggcaggagaatggcacgaacctgggaggcggagcttgcagtgagccgagatcgcgccgctgcactccagcctgggcgacagagcgagactcagtctcaaataataataataataattacttgatatacttgaaaaattaataaaaatgggggctaatcaggattaggcaccttgagaaaccaaaacccctggtttgccttcttttaggtcaaatttatctacttagtttatattataacttacaggtataaatgtggttgttgttattaataataatcttttattcagtgtctacttgctgccagtttcatgaggctttctttaaacattaatactgactttaggctagcttaaatatattataaattctgatacagatttctctagtcatgtgcttcttagttatgatgtcaattcagaattttttatcagaattttgttctagaaaaaaaaaaagtcaacacacgtcactgctataaattatatcccagaatgggggctaaaataaacttgcaatatcttwaaaaaatctaacttccatgccctattctagaaagctactggatgtttctacgaaaaggaagatgtgatagaggaaagatgaaattcaataaacaagaaaggttaaaggaatcctcaaaatagtggatggagccaggcgtggtggctcaagcctgtaatcccagcactttgggagactgaagcgaatggatcactcgaggtcaggagttcgagaccagcctgggaggtggaggttgcagtgagctgagatcatgctactgcactccagcctgggagacagagcgagactccatctcaaaaaaaaaaaaaaaaaaaaaagaatgaactgaaggcccattttaagaatcatatatatacacatataaatatatacatatatatgtatatatacacataaatatatatatgtatatatacacataaatatatatatgtatatatacacataaatatatatgtatatatacacataaatatatatatgtatgtatacacataaatatatatatgtatatatacacataaatatatacatatatgtatatatacacaaatatatacatatatgtatatatacacacaaatatatacatatatgtgtatatatacacacaaatatatacatatgtgtatatatacacacaatatatacatatatgtgtatatatacacacaaatacatatatatgtatatatatacacacaaatacatacatatatatgtatatatatacacacaaatatatacatatatgtatatatatacacacaaatatatacatatatgtatatatatacacacaaatatatacatatatatgtatatatatacacatatatgtatatatatacacatataaatatatacacatatatgtatatatatacacatataaatatatacacatatatgtatatatatacacatataaatatatacatatatatgtatatatatacacatataaatatatacatatatatgtatatatatacacatataaatatatacatatatatgtatatatatacacatataaatatatacatatatatgtgtatatatacacatataaatatatacatatatatgtgtatatatacacatataaatatatacatatatatgtgtatatatacacatataaatatatacatatatatgtgtatatatataaagaaaacaaggtcgggtatggggacacatgcctgtaatccccgctacttgggaggctgaggcaggagaatcgcttgaacccaggagtcagaggtttcagtgagcagagatcgcaccactgcactccagcctgggcaacaagagcgaaactccgtctcaaaaaaagaaagcaggcttagtgcagtggcttatgcctgtaacccaacactttaggaggtcaaggtgggaggattgcttgaggccaggagttcaagactagcctgggcaacatagtgaaacccaccccccttccctgcaagaaaacagaaaaaataaaatatagataattattttttatctgcttgttaggatatgaatgactttgtaagtgtgactgcatagggaaaaaaacataaaggaaaagattgatagatttttactaaataaaagtttaagatttatttatttatttttttatttttttgagacagtcttgcactgtcgcccagcctggagtgcaatggcatgatctcagcycactgcgcccagccaaggttttttttttatatcaaaaaaggttgtgaacattactgaatgatcttgcttcactgcagtcctaagtcttgtcattagtctattttagttatcttatagattttggagttgctccctctcattctttacttggaatgattcatttacaggaaaattaattatttaataaggtttatgagccgggcacagttgctcacgactgtaatcccagcaccttgggaggctgaggtgggcggatcacaaggccaggagttcgagatcagcctgaccaacatggtgaatccccgtctctactaaaaatacaaaaattagccatgtgtggtggcgtgcacctgtagtcccagctactcaggaggctgaggcaggagaatagcttgaacccgggaggtggaggttgcagtagctgagatcgtgccattgcactctagcctgggcgacggaacaagactctgtctcaaaaaacaaacaaacaaaaaattatgaccagacatggtggctcaggcctgtaattctagcactttgggaggccaaggcgcatggattgcgtgagctcaggagtttaagaccagcctcagcaacatggcgaaatcccatctgtacaaaaaagtacaaaaactatatgggtatggtggcatgtgcgtgtagtcctggctactctagaggctgattggtgggtggattgcttgagcccaagaggttgaggctgcagtgagctttgatagggccactatattccagcctgggtgacagagagagaacttgtctcagaaaaaacaacaaaattgtgcaggatctggattttttaaaaattaaaaaaattttcattaaaaattataaaacaaaaaagatttgcatctacattttgctatttttttatgtcttttttgttcctctttccctccatcacagccctcttttgtgttaaatagatatgttctattgtgtatagtgtagggagacccatctctacaaaaaatttaagaattagctagaacagagaaaacaaaaagaagtgatggtacatgcaaagaagtgatggtacatgcatgcctatagtctcagctacttgggaggctgaggtgggaggatgagttgagcccaggaggtcaagctgcagtcagttgtgattgttccattgctctacagtctgggtgatagagcaagaccctgtctcaaaaaaaaaaaaaaaaaaagtagccagacctactggctcacacctgaaatcccaggtgcgggaggcctaggcaggtggatcatttgaagtcaggggttcgatactagcctggccaacatggtgaaaccctgtctctactaaaagtacaaaaaaaattaggtgtggtggtaggtgcctgtagtcccagctacttgggagggtgaggcaggagaatcacttaagcccaggaggcagaggtcgcagtgagctgtgatcttgctactgcactccagcctgggcgacacaggaaaacaaacaaacaaaaaaaaaaaaacttgtgtttttgtatagctctgttcccttctttgtcctttgtgctattattgtcatacaaatgacgtatacccatcaacacatattataaatattgctttatgcagttgtcttttaagtcagatatgagaaaaaagttataaataaaaaatacatttatacagtcttttgtatttacctactatggcaggtaggcagaatactgcctcctccaaaaaaaatctatttcttattccctggaacctgtgaatatgttaccttacctggcaaaagagattttatagatgtgattaaattaaggattttgaggtggggggattagcttagattatccaatggttccaatgtaatcacaagggttcttgtaagggaagaagagggcaagagagtcagagtcagagagagatttaaaratggtatactacttagtttgaagatggagggaggggatgagccaaggaatttagacagcctcctaaagcctagaaaaagcaagaaaaatggattatctcctagagcctccacaatgaaatgcagccctgctgacatcttaattttagttcagagagaaccattttagacttttgaactccagaactgtatgataataaatttgcrttgttttragccactgagtttatggtaatagtttcttattgctgctgtcatttaatacagctatgggggagttagctttactaacattctttctttgtgtggattcaagttattgcctagtgccctgtcatttcacttaaagattccctttagtatttcttgtagggcaggtctactagcaatgaactctctcagttcttttcttttcttttcttttctttttttttttttgagacagagtctcgttctgtcgcctaggctggagtgtagtggtgcagtctgcaacctctgcctcctgggttgaagtgattctcctgcctcagcctcccaagtaactgggactacaggcatacgccaccatgcctagctaatttttgtagagatggggttccaccttgttggccaggctggtctcgaactcctgacctgaagtgatcctcccaccgtggcctcccaaagtgctaggatgacaggcatgagccaccacgcccagcctctcagttcttttttatctgggaatatcttaatttttccttgttttttaatggatagttttgctggatatagaattaaatactcagcagttgacaactctgttttctagtcttcaatgtcttcytttttttttttttttttttttttgagacagtctcgctctgttgcccagacaattttatttttaaatttttttagagacgggggtctcaccatattgcccaggctggttcagtggctattcacagttacactcatagcacactgtgaccttgaactcctggcctcaagctgtcttcctgcttcctcctcctgagtagctgggactatatgcatgtcaccatcctggcctagccttcactttctgcttgtgcagagcttcaaggtcaaccggaggtgagagtttagggccttctcagtactttactgagcgtggcctcagccctgggcatgtatacgtccttgtgcatacatgtggcttgctttttttaaagattttcttctactctcagacaatctagaaaacatacggctttctagatttccaggaaagccctgtgaacatgtccttccccagcttttccttttaagtttttttggtcaggcagccacaaagttaagcacttccctatatttttcacaaatactcctacctcccagggaaaaggctttttatgctgggtaagctctgagtctggtcagatatagataaccttgcaagtggggccttccagggaaccaccggaaaggtcaaataatgataattccctgggaatgaagcttcacaggcacgccaaccctgttctgccccatctagtgattgtcaagctgctgctttttcactgtgattgcaggcttttgatttttcagagcaggagatgggagtagggcaagttaaggtgctaacaaagctcaatgtttcttactgatattcaggcgttttgcttgaataaatgctcttagattgttgtaagcctttggtgttaatttccagaattctgaaaaacttgattttgacaatttttgttttatggagaagagaattttcaaagatcctttactctgccaattttgccagtgtcctccctcattctttaaaggcttttttagttcctggctcagagtcaccctctccaacactattcctggcttaattcttggtaaattctatgtccatattaattatctttccaacatctttatttcttagttccttatccatgtctctcccaaagatttttgacctctatcctgtctcagctactactcccatagtcgtactctagaccagtgcaccaggaccaagctgtttttgtaaataaagtttgtttaaatatagccttactccttcatttatgtatcgtctatagcctctttcatactacaacagccaagttgagtaattgcaacagacaccattgactctcaaagcctaaggtatttattgtctaaccctttacagagtttactgactcctgccctagatctagtcaattagagctacatctcctctgttatttcagtatcaagcatgctattcttccatcactcatttctactttcacaacacccttcctctggaatctctgctccgtcaatmctttgacactgtgaatcaccactgtttgtactgagcattacactctttttcaagtacttccctactgaacttgtattcattataattactttcttcgctacattgttaaatttctcaccgacaaaaactcagtccaactttttgcttacttcatgcctgtatctgtgtgtctacatgtggctgaaaaaactgttctgcctgttctcacattaagttcacaatcattagccttaagcaatcctacatttccctatccattcactctttctttctttctttcttttttcttttttttttttttttgagacagagtcttttttttttttttttttttttgagacagagtctcgctttgtcacccaggctggagtgcagtggcgtaatctcgggtcactgcaacctccgcctcccaggttcatgccattctcctgcctcagcctcctgagtagctgggactacaggcgcccgccatcacgcccggctaattttttgtatttttagtagagacggggtttcaccgtgttagccaggatagtctcgatctcctgaccttgtgattcacctgcctcggccttccaaagtgctgggattacaggcatgagccaccacgccgggccaagacaagagtcttgctctgttgcccaggcttgagtgcagtggtgcgatctcgactcactgcaacctctgcctcccgggttcaagtaattctctgcgtcagcctccagagtagctgggattacaggcacccgccaccacacccagctaatttttgtatttttagtagagacggggtttcatcatcttggccaggaggcaggagaatggcgtgaacccaggaggcagagcttgcagtgagccaagattgcgccactgcactcctgcctgggtgacagagcaagagtccatctcaaaaaaataaaaaataaaaattaaattaaatttaaaaataaaaataaaagtgagatatgatagtcctgttttagaagctctgttttcattggtggggcttgtcatttggtggcccttactataggaaggagttgattgaccattgatgagggaccatccaccttccagcatctgtaggtcttttgtcttaggcaagtcatttttcccttagaggaatcaacccatcttttgcctgctttctcatagcccagaggagcaaaaaggggtttgtgtttgactgttgctgtgagtgtttcatttcatctctgttcttagttgtgcatggtgcgggtgagtacccagcctgtccaacatattctgagtaaatgttcagacttttgctagaatcgtgaatgtaggggaggtgggaggaggctgccttgggtagtggagatgatctagagctctgattgtatcttttaggactttgagcgatcttcctgttttgaaccctacgctcttttcagagtacctgatgccacaaattgctgatcttttcctgggttttgaatgtttgctaacagtttcttcacttccacctctaccaattttataagcttaggtttcatctttttttggtctctaggttaacgtttatccatctgctttccagttcccaaaatggttttcacatctcttgtctgctattctcttctctcttgctctttgtcctcaaggatttatgcctatttttatttggtttcattttattgaggttttaaaaaagaaaggaggggaatgtataagtagagcaactaaccctcagttgtacaggktgtgccttttaagagggttccctgctgatcagaactaggatctctgactcggcactttgggaggccgaggcaggtggattgtttgagtctaggagtttgacaccagcctgggcaacatggcgaaacccagtctgtattttaatttatttatttatctacttatttttatttatttatttattttttgagacagagycttgctctgtcacctggctgacagactggagtccagtggcgtgatctctactcactgccacctcagcctcccaagaagctggaattacagttatgcgccaccatccctggctcatttttgtatttttagtagagacagagtttcgccatgttagccaggctggtctcgaactcgtgacctcaagtaatccacccacccagcctctcaaagtgctgggattacaggaatgagccaccacacctggtcagccactgcacccagccccatctttatgtttatttttatttctttttttgagacggagtttcactcttgtccaggctggagtgcaatggtgcaagctcggctcactgcaacctctgcctcccaagttcaagtgattctcctgcctcagcctcccgagtagctgggactatgggtgcatgccaccacacccagctaatttttgtatttttagtagagatggggtttcaccatgttggccaggatggtctcgatctcttgacctcgtgatccacccgtctcagcctcccaaagtgctgggattacaggcatgagccaccacgcctgcctgctatttttaaaaatataaaaaataaataaggaactagactctctaagaaaaaagaaaaaaaaaaagagggggccctgcttaaggtatttgaaatgatgggttaaaatccatcctgggccgggtgtggtggctcatgcctataatcccagcactttgggaggccaaggcgggaggatcacttgaggtcaggagtttgagaccatcctggccaacatggcaaaaacttgtctctactaaaaatacaaaaattagtcaggcgtggtgatgcacgcctgtaattccagctactcgggaggctgaggcacaagaatcacttgaacctgagaggtggtggttgcagcgagccaagatcgtgtcactgcactccagcctgggtgacagagcgagactctggggaaaaaaaaaatccaacctgagcttgattcactgtgccttaaacttgtttagccccgaggaaggtagcttctctaattcacaatggtcttatgctgagggtagccttggatatatgtatttgttgctgttgtctttagctaataacttgaatctgaggtatatttctgctttgtttctttaaaatkctgtagtaaattgttaatggtttttactgggttaagatatccattttttggaaaaggtccctatgtatttcttttgaatatagtaacaaattagtttcatctcttaatctctagactagtttccagtgtagctagctagttgacacctaattgagcactcagtaaccttagttaatgctcatttacttttgccctcatgccatccaaactcagattcaagcatgactttattacttcagcattctgcgtaataaaattcttgtcccataaacagtgactcacagaaggagactgattctaaaggattctgaaatatattttttactttttgtttttttgtttggttttgttttttgagacagagtcttcctctgtcgttcagactggagtgcggtggcatgatcatggctcattgccacctccactttccaagcttaggtgatcttcccacctcagcctcccgagtagcagggaccacagacatgtgacaccatacctggctaattgttatttttgtagaaatgggatcttgccggccgggtgcggtggctcatgcctgtaatcccagcactttgggaggctgaggagggcggatcacctgaggtcaggagttcgagaccagcctaaccaacatggagaaaccctgtctctactaaaaatacaaaaaattagctgggcgtggtggcacgcacctgtagtcccagctactcgggaggctgaggcaggagaattgcttgaacccgggaggcagaggttgcggtgagccgagatcgcgccattgcactctagcctgggcaacaagagtgaaactcggtctcaaaaaaaaaaaaaaaagaataacttgagctgataatgagtatcagcaacattttctactgtggccttgatagctgcagactggtactggtccatggcctgttaggaacctggtcgcacagcaggaggtgagcagtggctgagaaagtattagcacctgagctctgcctcctgtcagatcagcattagattctcataggagcgggaaccctattgtgaactgcacatgagagggacctaagtcatgcgttccttatgtgaatctaatgaatgcctgatgatctgaggtggaacagttatagccctgaaccatcccccgtcccgccaacccccctctgtctgtggaaaaattgtcttccaggaaactgggccctggtgccaaaaaggttggggaccactgctttataggaatactcggtagaatgatgattattacagtattggaacagagttaaagacagcaaaaatcttgagttcagtgaaacgaaatacttctcaaatttattagacccatcatatatgctttttaattagttgtctctagttttaacctttcccatatgtttcatacagagagacagctgtaatgtggcaacctgtggctcttgtcttttatctccagaatagtgatgtttttctttaagataataatttcttttcttttagcttttcttcctataagttgttatctctgcctgttgctttctagaagaggatccagaaggaaaatgctttgctgtttaatcaatattttaggagaggctactctacagaacaggaaatgacataatttaactcacaaggatggcgaaaactaaaataattagtttatctgtttagagtatctgaagaaaatagcagctcattgttctctaaagtggatcttgccacccaccagttgttgaaatctcagccttgtctttgtacatctcagtgtcgaaagaggtcgaggaaaaaatcctgtctttccatcttcctttatataaggaatggttattgtttagatgaaactgtatctaccctgaccgtgtcatatctgtagtacctagcagcacagtacctattagtagtagggcttcagtacattttttttcataaatcctgaagtaactattaagttctgggacagtggttcaaagggcataataaaaagggatgaaacatcaagtttctggaaaattgtggtgtatttgtgtattttcttgcatttgtggcgagactagtaaaagttaacctaattagattttcaaaagtgttcattgattatactcaaaaaayatttatggagtacttcctgtggtcaggcacagcactaacccctggtatagagtgttgaaggagacctttaggagatgtgaaagagggaataccctccttcatgaaacttccagtttattctggtagggaaacactataaaaatagctcttttgcctgagataagtgttacaaaggaaaattactcctgattgtctatggatgtggtgtctccaggttaatttttctgaaaatgagtgtggatagcagagtctctaaagaagttatcaggccaggcactgtggatcacttgaggccaggagtttgaaatgagcttggccagcaggggtttttccatgttggtcaggctggtcttgaactcccgaactcaggtgatctgcccgcctcagcctcccaaagtgctgagataacaggcatgagccactgcccagccagtaggaggatctcttaagcccgggaagttgagactgcagtgagctgctgcgatcaaaccactacactccagcctgggcagtggagtgagaccttaaaaagaaggggaaggccgggtgcggtggctcacgcctgtaatcccagcactttgggaggccgaggcgggcggatcacgaggtcagaagattgagaccacggtgaaacccccgtctctactaaaaatacaaaaaaaaaaaacaaaaattagccgggcgtggtggcgggcacctgtagtcccagctacttggaggctgaggcaggagaatggcatgaacccaggaggcggagcttgcagtgagccaagattgccctactgcactccagcctgcgtaacagagcgacactctgtctaaaaaaaaaaaaaaaaaagaagaggaagactgtacagactactagagattatggcaacctctttctcaatcttgttttcttgttttttgtttgttatttgtggagatggtatctcactttgttgcccacgctggtctcaaactcctgggctcaggtggtcctcccacctcagcctcccatagtgctggaattacaggcatgaaccaccatgcctggtctgtagtctttttttttttttttgagatggagtttcgcccttgttgcccaggctggaatgcaatggcaaatggcaaactctgcctccagggttcaagcaattctcctgcctcagcttcccaagtagctgggattacaggcatgtgtcactacgtctggctaattttgtatttttaatagagatggggtttcaccatattggtcaggctggtctcgaactcctgacctcgggttcgggttatccacctgcctcagccttccaaagtggtgggattataggcatgagccaccatgcctgtctgtggccctcagtcttaatagtgcaaccaagaaaatgtctcagctacccaaataggggagatggtttacacatcagaatgttatctggggactttatctcctgaatttggtcctgggttgctcaaatgaacactagctagttccattttagctcttctgatggagcccagtgtagactggtacaggaattgtggaggatgtccctgccttgtgtggacatgttccaacctgaaataagggtggtcttgagaagctaaaaaaggagaagaactcaactgatttttttaattgatggtttagtagccaacttctgacctgttcttagcctgaaaagacctactgatatcaggctaatcatagttctgagataaaggtcagtggatgaagccctttttggaggatccctagggcacatttaataacaacagaaacttcagcagcagcagcagcagcattttatcagactatgttccaggcagcaataccaaatgcttcttatatatttcctttaattattgcagtagctctatgcaatacacactagcataatttttattttactaacaagaaaattgtggcttaaagaagttaaataacttgcctaaagttgcacagccagtagtggaggctctatttaaagccaagatggctatcttcaaagtccatttgtcgtaatcattatctcctatttatcttcatcccctttacttctatttgaatagtatttctttccttatctcatctgttcttaaccaaggccctcctttacttcttcctaaagtagtccacatctgtggagcttctcaggaatatacttttttgtgagatttttctataagattaaaattataaattaaatggctaaaaatttttacatactgtaaacagacccagacagttaaagagattatagagatttggcaggaaaaactcgatgcttttggaaagctcttgatagtattcacagataagcgatagtgaaaattgagactaatggatactggtaaaaaattagatgtggtatggttgatcatacttgttgtgattaaagctaaaacattattcaagtttgctagaaagttgaagagctgaatttgggctggatggagaaggtaagaaaaaaacacactgcacatggtcctcatttatgaacttaaatctttcctggctgccaactacttgctgattagaaatctgaactcccaacctgtatactaggaaatctagccttttattgtcctggtttaagaaggatttaaattgtgctcagtattgaagtttttgggtcggaactattttaatattatctatgaataaatataaggtcatacatattagtaggggagagagcgtatgggataaattgatctctctctctcttttgctctttattttgagagaggggttcttgctctgttacccaggctagagtgcagtggcatgatatcagctcactgcaacctctgcttcctggtttcaagtgattctactgcctcagcttcctgagtagctgggattaaaggtgtgtgccaccacacccagctaatttttgtgttagtagagttggggttttgccatgttagccaggctggtcttgaactcctggcctcagatgatccatccaccttggcctcccaaagtgctggaattgcccacgtgagccacctggccttcatatatagaaaatatatatttattttacatacacataacacacacacacatatacatgcatatatatatatatgtatatatatatgtatctgggtttagagtagtcatgtaacccaggaaaggaatccagaaatcaatatagacctccttaagataagagcagtagctttcaatgtcagtttacaaggtaatggttatactaaccataaccattttgtgtttgttggcattaaaaacaaacacaaaatgttatcccttgaagataaagacaaataggttcaaaagtagaaaactttgtacatttctgataataccttaaaaaggtcctgagaagagtaaataaactaccctggaaatgtaggcaataccatagagttttctttaagttccagaaagcctggaagttggttgagtagtatgtatcgaaaagccttaaaggccgggcatgctcgtttatgcatgtaatcccagcactttgggaggctgagcttgggaggattgcttgagcccaggagttcaagaccagcctccgaggccaagtgcagtggctcacgcctgcaatcccagcattttgggagaccaaggctggcggatcatgaggtcaagagatcgagaccatcctggccaacatggtgaaaccccgtatctactaaaaatacaaaaattagctgagtgtggtggcatgcacctgtagtcccagctactcaggaggctgaggcaggagaatcgcttgaacccaggagacagaggttgcagtgagccaagatcgcgccactgcactccagcctgggcgacagagacagactctatctcaaaaaacaaacaaacaaacaaacaaaaacagcctcctcaacaaagcgagaccctgtctctataaaaaatgttttaaaaaaagcctcaaaatgtgcatacccttttacttgcttatatgtaggacttcaccctatgaaactagtgaaacaggtgcaaagatatttctctcagccaggcatggtggctcatgcctataatcccagcactttgggaggctgaggtgggtagatcgcttgagcccatgagattgagaacagtctaggcaacatggtgaggtcctatctctactaaaaataatttttttttttttttgagacagagtcttggtctgtcactaggctggagtgcagtggcacgatctcgacctaccgtgcaccgggttcaagtgattctcttgcctcagcctcccaagtagctgggacgaccggcacacaccaccacgcccagctaatttttctattttcagtagagatggggtttcaccatgttggccaggctggtctcaaactgacctcaggtgatccgcccgccttggcctcccaaagtgctgggattgcgagtgtcagccaccacacccggcctttttttaatcagctggtggaatgtgcctgtggtctcagctacttggcagactgagatagatcactggatcactggagctctgggggtcaaggctgtagtgagccatgattacatcactgcactccagcctgtcagcagagggaagaccctgcctcaaagaaaaaaaaaaaaaagatayttctctcagccttgtttatacaagtgaaaattaggacaacctaaatatccatctatagttaattggttaaatgaatcgtggttggtttgttcaaaataattctattcagctgggcatggtggctcacgcctataatcccagcactttgggaggccaaggcagttggatcacttggggccaggaatttgagaccagtctggccaacttggtgaaaccccatctctactaaaaatatgaaaatttagccagctctggtggcaggtgcctgtaatcctagctacttgagaggctaaggcacgagaattgcttcaacccagaaggtggaggctgcagtgagctgggatctcgccactacaccccagcctgcatgacagagtgagactgtctcaaaaaaataataatggtaataattctgttcaagcatttaaaattatgttttaagttggccaggcatggtggttcacgaggcccgcaatcccagcattctgggaggccaaagcaggcagatcacctgtggtcaggagttcaagaccagactggccaacatgatgaaaccccatttctacttaaaaaaaaaaaaaaaaaattagcccggcatctgaaataccagctgcttgggaggctgaggcaggagaattgcttgaatctaggaggcaaaagttgcagtgagctgggatcgcgccactgcaccccagcctgggcaacagagcaagactcttgtctcaaaaaattacataaataaataaaataaaaataatgtttttgctctctccggtccgtgcctccaagatgacaaagaaaagaaggaacaatggtcgtgccaaaaagggccgcggccacatgcagcctattcgctgcactaactgtgcccgatgcgtgcccaaagacaaggccattaagaaattcgtcattcgaaacatagtggagtccgcagcagtcagggacatttctgaagcgagcgtcttcgatgcctatgtgcttcccaagctgtatgtgaagctgcattactgtgtgagttgtgcaattcacagcaaagtagtcaggaatcgatctcgtgaagcccgcaaggaccgaacacccccaccccgatttagacctgcgggtgctgccccacgtcccccaccaaagcccatgtaaggaggtgagttcttaaagactgaagacaggctattctctggagaaaaataaaatggaaattgtacttaaataaataaataaaaataatgttttaagttatagctaattgacacaaaaatgttcacgatgcagtgaaattctgataacctttcatagtctgaaaaatctagttgttctaggagaaataagtcatccagaatgttctcttgtttgtttttgagacagggtcttgttctctcgcccaggctggagtgcagtggtgcaatcacagctcactgcaacctccgcctcccagactcacgtaatcctcccacctcagcttccccagtagctgggactactggtgcgtgccaccatacctggctaatgttttatatattttttgtaggtacagggtttcaccatgttgcccaggctggtctcaaactcctagactcaagtgatccacctgcctacagtgctgggattacaggtgtaagccactgtacccagccattccagaacattctgatgattcaaccataactcatttcatagtataattgagtggataagaagggttggtgtttgctgtctcgccatattaatagttttgtgttggaactccttgactgtcaatcaagtattatgtttgaggaagatgtaaacatttaatacttttaagattaggagaggtttgaagggttttatgtcatgaacacacatattaaggaagaagcatggctctgccctcttgaaagactaaagaaatattccatcagcagtttactttagaagaactgaaagaataggttgatactgaacccactcccagagccaggtagctgaaagggcactgtgattgttatcttactaggaacacgtggagtgggagtaaggcagttttctgcagaaaagagggattctgggcagacaaaaactacatatgcactatgttttgttttgttttttttgtttgtttgttttaaattaaaaccagaaaaggcgaagacttggagaatgctcaaaatttttttttttttttgacacggggtctcactctgtcacccaggctggagtgcagtggtgtgatctcagctcactgcaacctccacctcctgagctcaggtgatcctctcacctcagccacctcagtagctgggactacaggctcttaacaccacatctggctaattttttttttgtattgttggtaaagaccgggtttcaccatgttgcccagcctggtctctaactcctgagctcaagcagtctgcctgcctcagcctcccaaagtgctgggattacaggcatgagccactgcacctggtcacaaaatgtaaagattttgagggccattgattttaaactccagaagctggtccaatcagaatgaacgtaaggatttttgttagtgtgattagaaaagaatgtgtctcggccgggcgcggtggctcacgcctgtaatcccagcactttgggaggccaaggcgggtggatcatgaggtcaggagatcgagaccatcctggctaacaaggtgaaacstcgtctctactaaaaatacaaaaaattagccgggcgcagtggcgggtgcctgtagtcccagctactcgggaggctgaggcaggagaatggcgtgaacccgggaagtggagcttacagtccggcctgggcaacagagcgaggctccgtctcaaaaaaaaaaaaaaagaaaaaagaaaagaatgtgtctctttctactgggtttggagctgtgagtttataaaatttgggccgggcgcggtggctcgtgcctgtaatctcagtactttgggaggctaagacaggtggatcacctgaggtcaggagtttgagaccaccctggccaacatggtgaaaccccgtctctactaaaaataccaaaaattagccgggcgtggtggtgggcatctgaaatgccagctacttgggaggctgaggcaggagaatcacttgaacccgggaggcagaggttgcagtaagctgagatcatgccactgcactccagcctgggcgacagaggaagattccgtctcaaaaaaaaaaaaaaaaaaatcgaagtgctacagccaccttgccacctaggaggagatcctggctgacaatgcagctgtgccagagaaaacaccaagagagggagggtttgaaattgggcccgaagacatcatttgagcccgtacatcaggtcatgtgtgatatagactttttcagttacacgagagccactaaattctctttttaagtcaggttggcagtggtttttctatcatttctagctgaacaagccctaatacaatatccttaggggtcataacatccaactacctcatgtcttgaagtttggagaagtgaagtgacttacttaaggttatacagataaatggtaaaaaactgggactaaaacctggccccttcccacctcctttgtaagataattactccaatgtgtaaatcactttaaggaggtttggggcaaagtcttaaatgggtttgaggatgccatttaagtaatggaaatcagycctgctctcatagtaagtgtcatttggaatgacagtgactgctattgacagaaaactgaccccaccatcatagctcttatttttctcagactttggataagtgggctgtccatagtatcttcatgattggtagcttaataaataaattatttgtgaaatcactggataacatttggctagctgttttaatgttgcccmttccctcagcctcttgagcttctagaatcagcagacttgtttttccatggtgtgtctagtaatatgaaatgaaatatggacctcaaatatataaatatatgccaagctctttctttttttcttttggagatggagtctcgctctgttgccccaggctaaagtgcagcggcgcgatctcagctcactgcaccctctgcctctcaggttcaagcacttctcctgactcagtctccagagtagctgggattacaggcatgcaccaccatgcccggctaatttttttgtatttttagcagagatggggtttcaccatattgtccaggctagtctcaaactcctgaccttgtgatctggccaactcagcctcccaaagtgctgagattacaggcgtgagccaccgtgctctatgccaagctctttcttgccttaggagtttgcatatgctgttccctctgcctatagtgcttatcccttggctcttcacatggatggctccttctcatcttttgggcctcagtttaaatccagccttagagatgccatctctgattacccaaggtagctcccttctcattgttctcttatcacatgacctatttgtctcctaatagcagtttctaatttatatctaatttgtatttacttaccagtccctttcgtttaccacctatactcagtgtgtatagcataggagccatacataagaagtactcaataattatttgttaaatggttgggttctgttatcctaggcttgaaaaacattaaaaagcactatttgtaccctttcaccaaccctgccccaagtaccttaattgcccttacacctctactgactgaaaatacggcacaaatcctgaagagaaagggaaactaaaagctgtayttaactgctatgctgatagttgtcttaggcagttttgaattaatattttattatctctgttcttcascttgttgtgccttgttttttctcttctctgtgacttctcacctacccacttgactctgaccagattcctgacacttaaagggtatatccaagaaatgagatggccctgagcacaggggaggaaggatggaatgacaagggccaccagaaacctctttcaggactctaatcactctaaggtcacagtttagagtctagaatgagagggactttgagtgcctctttttcttgctcagtgccctcagcttgagtgcttagctggcagacgggcacttttcctcctcagttactgtcaaagcaacatgaaggtcaggcagagagagacaaatgagagcagctcagggaaaggaggttaccacggtaacaagcaggagggactgctatttggaaacagacctaatctttctcctccttctccctccttctcagcacaggaagatgggtattgtttagctgacctgcatccttggggtgggaaccataatccctttctgacagttcccaatgacactggagtgatctgctttgcattttaatttgataagcagcagcggcagttttctctgaagtgctgaaaacatggctttttctggccctgttccagataggattctggttgccacagagaggggtttgatattgttgtttatttctcaacaaagatcttgcatatttgcataaatgtggaagatgctgcttggttctagacaaccagaatcaaatgaatacaggctatctttaggttatgaatatctatctgctctaggaaggtcacagagatactgccccatccccagctcacaggaccacccagtgacctgtgcagtggatcttctgacttaatgtccttacccttctgcctcccccatctacttatatgtcacactattctcaatctcttcccttacctaccctacccttatagtaagccttcactatgtatataaatattccttccttttctttcaaaataaaaagagcattttaaactagaaaaataaattatcaatgtaatgaaaaattaaatgccaaaaaacataagagaaagtaaaaatcatctagaatattactatagacatgatggctagaacatccttccagatctaaacctctaattctatctgctttgttttgttttgagatagtctcgctctgtcacccaggctggagtgcagtggcacggtctcagctcactgcaaactctgcctcctgggttcaagcgattcttgtgcctcagccacccaaatacctgggattacaggtatgcaccaccacgcctggctaattttttgtatttttgatagagacgggttttcaccatgttgtccatgctggtctcagactcctggcctcaagtgatccacctgcttcaacctccaaaagtgctgggactacaggcatgagacaccacatccagcctctatctgctgatctacgcattttatgagttgtatatacttatgtatagatcagtttatttttatttatctttaattttttaattttctaacacttctcaaacaaaaagtagagttaaatttaacattaatgggccaatatagtacatgctccatcatactttttcctttaattcactaaaaaatatgttgtagatatgtcattgatgtagatagggatctatgctatgatggacctatagattgtttctggttttgtggttattttttggtttggctattaaaaacaacattgaagaaaactgtccatcatacatctttktgtgtgwatatatatatatatatatatatatatatatatatatatatatcctgttatcttcttgatacaaatcctagaaattgaattttgggacaaaagaacatgtgcattttatattttgatacatattgccaaactgccctctagagaaggcaccaaccaatactgcataaaagtccctattgtttttacatactcttaccaactgggatatgttcaactctctcatctttgccaaatagatgggaaatatactgtgtttttatttgtgtttatgtatattattgaatccttaaaaatactcacatgaccccttcagattttacactgaagacctatctacttcttttcccataatgtacttccaggcttctctttcctgtagtgctggcaactgagcaaagtaaaaaaaaaagttattttgtggtggtttttttttttttttttttttttttttkggtttttgagaagatatcaaacaaaaaagtaaaaaattttaaaaacacctaattgcattaatctytgcaccctccctccaaaccaaaaccaaacctgttttttttytttttctttcagkgatggactgtcattcactcagatttaagctccaaagactgagatgtttgtctgtttgttcatagctgtattctcagtgcctagactggtgcctggcatgtatcagttgctcagtaaatatttgtgcagtaaatcatctctcagccatcttaatcagaaattctaatcatacctaattcctttactgattacctacatgtctgatgccttgcaaagtcaaattgcttaaaggtcctgaatgtctcttgggttcttccctttatccccctacttctgatcattcttacttatgtttttattcctaggagccctccttttcaatctctctagtttactcccctccttctattaattttacctttggatatacagatacaataacatcataccctttctttcattcctcagtggcttcttaatacctgcaaggttaagtcccaatttaactctccctgtactctttaaccaaaccaagcagcttgttgttctttaaatacattgtgtttgttcatgcctgtgtgcctttgaagaggctgttccttctgcctggaatatgctttcttcttttcttgggaaactactacttattctttaggtccactccagcattgagtcatccytattccctctggcagttattccctgggcaggatacttgcagtcctttgttcacttctgttatgattatttgtttgccaattaatctaatctaaaatgaaacttygtggccaggcacggtggctcatgcctgtggtcccaacagtttgggaggccaaggtgggcagataagtccaggagttcaagacgagcctggccaacacagcgaaaccccatctctaaaaaatagaaaaattagccaggtgaggtggctcacgcctataatcccagcactttgggaggccaaggctggcggatcacgaggtcaggagatcgagaccatcctggctaacacggtgaaaccctgtctctactaaaaatacaaaaaattagctgagcatggtggcgggcacctgtagtcccagctactcaggaggctgaggcaggagaatggcatgaaccctggagtcggaggttgcagtgagcagagaatgcrccactgcactccagcctgggcgacagtgcgaggctgtgtctcaaaaaaaaaaaaaaaaagaaaaaaaaaaacagaaaaattagccaggtgtggtggcagcacgcctgtagtcccagctcctcgaaggctgaggcacaagaatcacttaaacccgggaggcagagtttgcagtgagccaagattgtgccactgtaccccagcttgggtaacagagcaagatcccatctctgaaagaaagaaagaaagcagggatggcgggggtgggggcgggagaagagggagggagggagggaggaaggaagaaaggaagggaaagaaagaaaaaaaagaaaaattaatggcctctcttaatttttataagctctatatgttaagtatgttctacaaaattctaaatttatatagtctttgttatttggtattttgggttttgttggtctgttttagaagaggtttgctctagggagttgttgtagagcgaaatttagtttatcaaggcttgactgctttatgatttcagttctgcttcagagtatatttgtactgaaaaatcagagccattttatgatgcaacttatgcagttcagccatcaccttctcccatttgttccccacactgcaaatctctgagtcctctgtgttatgcctcttccttacccaacaggttgccaagtcctgtgatttggccctcttgttcctgatgccaccactctagttgaacattgccattaattttttatgtaaaataattttattttacaataaagccctttcttcccatgaaacctagagcataaagtgggaggagagcagtgatggacgatgaggctgaggaaggagacaaataaattgttattgcatttactgagcatgaactgaagtggacagtatgctaagtggtctacgggtctcatctcttctattcctaacagccakgtaagatagttaaatccccatcttacagatgatgacacactcatgtggaaagtttaaatcacttgaggaaggtaatagagctaatgagggtagaactaagactcatacctaaggatttaccaaaattaatgtgcaaatcaagatctaaaaataaataaaattattgaacaacctttcattgtcctttttacaaaagatgaatgtgcttaagcagaggactactaaataataagtaccctcttttctgtctgacatagcaccttgagttttattgagctcaaacatttaagtccaaattaatcrtatttgagaagaattttcacacagtgatcctattgtctagagtattctgctaaatgggagcataccagaagactacagataggcaaacgttcaaattttcaaaattgcagaccatacgtggtgcttaacagtgatcttcagcaaaatcctagaacaggatataaacaaatcacttgtgaactacttgttctctccttccttggccttctaagcttctttgcagtagcatagtatagtggaaaagagaataagcttcaaagtcagacatacattggttcaaatcctgaccctgtcacttaataactaggtaattgcaggcaagtcagttaaccttcctgcagctctgtttattttctatcaaaaaagctatcatttacttcaaaggagtgttatgagatttaataagataacatgtagaactcctggcacacartaggcatacaataaattctaattatcttcccttcatctcatcatgctttcctttacccagtacagtttagcttttgggccctacttttttctgcaactagaacttcttgctaagtttatttaacactagcccattttcttctttaaacttcatttccccttgacttcttatgacagtgttcagttttggttcttaattctttagtactgtatgggttctggcaccaaattgtctgagcctgaatcccagtgtcatcacttagtagtaaccttggctaggttagttatctagcccctctagccttgataattcatctttaaaagcaggttactagtagtaattaccccagagggtagttttaaggaataagtgaaatgcacataaaatgctttgaaaagtgctgggacacacacaggaagcaataaattaaagtttgcttttatcgttatgatgattattattttcagacttctttgtggtcttttcttcctggatttactcatttaaatgttgatgttccttgggttctctcagattgccttcttttttctctccagtctcttcaggctgtcttacccagcaagctcatgactcatgacttctattaactactgccctgacttttcttttttctttcttttttttttttttttttttttgagacggagtcttgctctgtcacccaggctggagtgcagtggcgtgatctcggctcactgcaagctctgcctcctgggttcacgccattctcctgactcagcctcccgagtagctgggactacaggtgcctgccaccactctgggctaattttttttttttttttttttttttgtatttttagtagagacggggtttcactgtgttagccaggatggtctcgatctcctgaccttgtgatctgcccaccttggtctcccaaagtgctgggattacaggcgtgagctgccgtgcccggcactgccctgacttttcttctgagttcccatcctttgcatccagttgcctatttaaaactcatacctaaagttgaacktgctttctcgcttttattccaccaataatttgccattgttgctgttgctactgttgtgttcttgcatctcctgagataatggcgtcagaaatcttgaagtcagcccagatttttcttacctccttgacttgagtcagtcactgagtcctatttttttttttttttttgagatagagtcttgctcttgtcacccaggctggagtgcagtggcatgatcttggctcactgcaacctccacctcccaggttcaagcaattcttctgcctcagcccccagaagtagctgggattacaggctcccaccacacctggctaatttttatatttttagtagagattgggtttctccatgtcgcccaggctagtctcaaactcctgacctcaggtgatctgcctgcttcggcctcccaaagtactgggattacagtcgtgagccactgcacctggcccacagtgcctttctttatcatgacaagtaatctcccaccactccctccaacccctttatgccaaactattgtggcctctattgcacctgactaaaataatcaactcttttcttgttcctctgttgaatttatcccttaagatttagctgaggcggagcgtggtggctcacgcctgtaatcccagcactttgggaggccgaggcaggtggatcatgaggtcgggagtttgagaccagcctggccaagatggtgaaacccatctttactaaaaataaaaaaaaatagccaggcatgctggcgggcacctgtaatcccagctactcgggaggctgagacagagaattgcttgaacccgggaggtaaaggttgcagtaagccgagatcacaccactacagtccagcctgggagacagagtgagactccgtctcaaaaaaaaaaaaaaaaaaaaaagattaggctgaaatgtcacctgcctctcccccaggtagacacaaatgattctgctccttttatacttacctcttttgcrttctttatgacattactttaattacttgttcacatttgtttacctcacccaaccttgggacagggatcatattatatttctmacttagtatagtataatggttacaccatagtaagtatttaatgtcgctgaaaggaatccagaaaaagaatgcttactaggaaccaaattaagttctaaagcaaggcttgctaaactacttcctctctctcccctttttcccccaatagagttgttaggtgggtagattggagtgccttgatttcttcaaggtatttgaaaaagccttttatgatattcttgatgacatgttgatgaaatgtggactggatagtgatacagttgggtgattttatagctgactgaagagctatatttaaagattatagatgactagatgtttgtcagctaggatagaggtggtataccacaggactcttgcctttggtccattcttgttcagcatttgtattataacatcagtgactaaataaaatgtatgcatataaatttgtgggtaatgtagtggtcaggactttttcagttatgatagaaatctggctcaagctagtttaagcaaacaaagaatttatagattcccaggaatggagtttattagtttaggcagggtttcaaataatcccatcaggattctgtctttgcttacctccattctgctttcccctaatttggctttatttaatttaatttatttagttatttattcatttatttatttatttattttttgagatggagtctcgctctatcgcccaggctggagtgcagtggcatgatcttggctcactgcaaactccacctcccaccttcacgccattctcctgcctcagcctcctgagtagctgggattccaggtgcccgccaccacgcccggctaattttttgtattttcagtagagacagggtttcactgtgttagccaggatggtcttgatctcctgacctcgtgatccgcccacctcagcctaccaaagtgctgggattacaggcataagccaccgtgcccggcctaatttggctttattcttagggaagttttctttgtgagtctggcaaaatggcctctcgcagcttcagattttattagtccttctagcttaaggtaccaaaggaagaaagaaacagtataacctgtatataacctgtttcatgtagttttggtagatctgcccactcctatactgcagtgaggtgaaggaatgtatttcccaaaggtaatagagattcccctgctagaagaagggagggaaagcatgataaaaagccataactgtatctccatgaaccactacaggtggttatctcaagcctggaaatctgaatagagattaacaatgttgcaagacactagaaaggtggagttaagttaacaagatactaccattaccattattattgtctaatattttttgaacttttactgtatatagctaggcactgtacactgaacactttacattcagttaatcattacaatgaccttatgaaatataggtaactttgatggttttattttgcagaagaggaaactgaggctcagaaagattgcataatgttattagtggttaaccagctgttaaataatagagctgagatttttttttctttttctttcttttttttttttttttgagacggaatctcgctctgtcgcccaggcttgagtgcagtggcgcgatctcggctcactgcaacctccgactcccaggttcaagcgattctcctgcctcagtctcctggatagctgggattacaggcgcctgccaccacgcccggctaatctttttttttttttttttttttttttggtatttttagtagagacggggtttcactgtattagccaggatggtctcgatctcctgacctcgtgatccacccgcctcggcctcccaaagtgctgggattacaggtgtgagccaccgcgcctggccttagagctgagatttcaaccagtctgtcttttagcaggattagcattttaaatgtatttatttatatatttattttggggatagagtctcactctgtcacccaggctggagtgcagtggcacagtcatggctcactgcagcctcaacctcctgggctcaagcagtcctcctgcctcagccttacgggtctgcaaggacccgccaccatgcctggctaatgttaaaactttctgtaggccgggcgcggtggctcatgcctgtaatctcagcactttgggaggctgaggcaagcgcaggagttcaagatcattttggccaacatggtgaaaccccgtctctactaaaaatacaaaaatttagttgggcatagtagcaggcgcctgtaatcccagctacttgggaggctgaggcacaagaatcgcttgaaccgggaggcagaggttgcagtgagccgagaccatgccactgcactccagcctgggcaacagagcaagactccatctcaaaaaaaaaaaaaaaaaacagaaaaactttttatagaaacaggatctcactgtgttccccaggctagcctcaaattcctgagttcaagcagtcctccaaccttggcctaccaaagagctgggattataggcatgagctaccacttctgccaagatcagcatttatagtttaaaacggttacatcagtaataccagcactttgggaggccgaggcaggaggatcacctgaggtcaggagttcgagatcagtctggccaacatggtgaaaccctgtctccaaatacaaaaattagccaggcatgggctgggcgtggtggctcatgcctgtaatcccagcactttgggaggccgaggctggcggatcaccctgaggttgggagtttgagaccagcctgatcaacatggagaaaccccgtctctattagaaatacaaaattagccaggcgtggtggcacatgcctgtaatcccagctactcgggaggctgaggcaggagaatcgcttgaactcgggaggcggaggttgcagtaagctgagatcgcgccactgcacttcagcctgggcaataagagtgacactccataaaaaaaataaataaataaagtaaaaaataaataaataaagtaaaaaaaataaataaataatagaactatcatttactgaatttattggtgtcatatcaaggaataatatccacagttatctgaaaaggctattaaatacaaacattatatacattatctgtaaaacaacacacacatatacatatatctgtaccatatatattctatgtaaggctgattttctttgtatacttgaaccaaaacatttcaccaacagattgaatggagaatccagctgtcttctattaaaccagacattgaaaataatatgttaatatttaacaggttttttaatgttattttaactaacttaaggcatactttttttttttttttttttggagacagaatctcactgtgttgcccaggctggggtgcagtggcgcgatcttggctcactgcaacctccgcctcccaggttcaagtgattctgttgcttcagcctcccgagtagctggaattacaggcatctgccaccacacctggctaatttttgtatttttagtactgacggggtctcaccatgttggccaggctggtcttgaactcctgaacttaggtgatccaccctccttggccccccaaagtgctgggattacaggcgtcatctactgcacctggccttaaatgttttcttctttctttctttctttctttctttctttctttctttctttctttctttctttctttctttcttctttcttttctttctttttttttttttttttttttgagacagagtctcactctgttgcccgggctagagtagggtggcaggatctcggctcactgcaaccccctcctcctggattcaagcaattctcctgcctcagcttcctgagtagctgggattacaggcatgcgccaacaygcccggctaatttttgtatttttagaagagatgggttcaccatgttggtcaggctagtctcgaactcctgacctcaggcaatccgcccgccttggcctcccaaagtgctaggattacaagcctgagccaccatgcccagccaaattatttcttattttaattctagtctggtaaacatcagtcaatttatcccacataaataaaagttctttggggttcttaacttttttaaaatctttttgttttaatataattgtatttgtaatacagtmctctcatgtaccatgtacccttttcctaggtttccccaatgataatatcttgcagaactctagcacaatattgcaactgggatggtaatattgatgcattcacctattgtgttcagatttcccccatttactcgtactcatttgtgtgtttttctgggtgtgtgtagttccatacagttttgtcccatgtataagttcatgtatccaccacccagtcaagatacagaacagttacatcaccacatcaccaaaaagatctcttgtgttgactatttacaactacatttacctttcttccaccttcccctgcccacccctaatccctggcagctgccaatctgttctctttgtctctaattttatttcaaaattgttatatgtgtgtatgcatgcatgcgtgtgtgtgtgtgtgtgtgtgtgtgtatttttttgatacagcatctcactttgtcccccaagctggaatgcagtggcatgatcatggcttactgcagcctcaacctcctgggcccaagcgatcctcccacctcagcctcctaagtagctgggacaacaggcatgtgcaaccatgcccagctaattttttttatttttaaagatggggtcttcctatgttgcccctgcagatctggaaatcctgggctaaagcattctacccacctcaggctcccaaagtgctgagatgataggcgtgagttaccacacccagccctgttacttgcatgttttagttttaatttttctttctttctttctttctttctttctttctttctttctttctttctttctttctttctttctttttttctttcttttttttctctctctctctttctttctttctgtctgtctgtctttcttgtcctttcttttactttctttcttatcactctgtcgcccaggctggagtgcagtggtgcagtctcggctcactgcaacctctgcttcctgggttcaagcaattgtcatgcctcagcctctcgaatatctaagaggctaatttttgtttttgtttgtttgtttgtttgttttttagtagagatggggtttcaccttgttagccaggatggtcttgatctcctgacctcatgatccaccctcctcggcctctcaaagtgctgggattacaggcatgagccaccgcgcccggccgtatttttttatagagacggggtttcatcatgttgtccaggctggtcttgaactcctgacctcaggtgatccacccgccttgggctcccaaagtgctgggattacaggcgtgagccacggtgcatggcctcattttaatttctaatatgttaaatatcaagggatatagcctacctaaaccaaggctctttaaggttctcattttttttttttatgggactaggtataagagggggaaaatatgttaagtatatgaaaaaaataaggccgggtgtggtggctcacacctgtaatcccagcactttgggaggccaaggcgggtggatcacttgaggttaggagttcaagaccagcctggctaacacggtaaaacctcgtctctactaaaaatgcaaaaattagtccagtgtggtggcatgcacctgtagtcccagctgctcgggaggctgaggcatgagaattgcttgaacccaggagtcagagatcaagccactgcactccagcctgggtgacagcatgagatgctatctcaaaaaataataataataataaggttctcagtttttaagaatttcctgcaaggtgaagtgtcacacctgtaatcctagcactttgggaggccaaggcacaaggatctcttgagcccaggagttcgagagcagcttaggcaacatagggagacccccatctttacaaatttaaaaattaaaaattgagcaaaccaacgcagaaacagaaaaccaaataccacttgttctcacttattagtgagagctaaatgatgagaacacatggacacttagaggggaacaaacagacatgggcctactcaaacagagtggagtagaaaagagtagagggtgggaggaaagagaggattaggaaaaataactaatatttactaagcttaatacctggatgatgaaataatctgtacaacaaaccccagtgacagtttacctgtataacaaacctgcatatgtacccctgaacttaaaagttaacaacaaaaacaacaaatagccaagtgcagtggtgtgtgcctgtagtcccagctactcaggagactgaggccggaggatcgttgagtccaggagttcaaggccatagtgagcaatgattgcgccactgtagtccggcctgggtgaaagagcaagaccctgtttctaaaataataatttttttttaagaatttccatgaccagaaagttttagaacagctggcttatagcagggagaatcatcccattcctccttcctaagccacagcagagcaaaatgtgatttgtgatgtctcaatttagaattctcatgttttctcacaggactgacagtatgaataatgattcattagttcttgagtacagtttggtccagccacrttataggttaaatagatttctgtgggccggcctaggaatcgctgtttaagacttctgacatcgtgattattaagatttcagaaaaaggctttagctttctgttgtgtttactttatttgatttgtggagttttttaattttgcattttgtttgcttacttgtttttatattcttaaaggtaaaagagtggagtaaagatgacacacttaagtcttgactttttaggaaatgcatatgtgaaaggaggtaaaagaagtgtattcaggaaaggaagtagttacagaagwtctttattcttaggaagcaaatcctaatgcttaccttgtaaccatacaggaataggagggattatcagccttctatggtaaacatacagtcagcttcagaggaagtacttgggtctctatcatcactcatcagctgcaaagttaataagctttgctgaaggaaaatgtgaatttcaagcaggcaggagattgtagagtgagaagacttagggaagagcaatggagatgcttcattcagcaaaaacctttaccacagtaatggacactgccatgtgatttgtgttgcacactgattttgcttatgagattttttcctttgttaaatttcaagcataatttatctgtttcccacacactgggaatttctagacagtcttgaatatcaggattgtttgatctgctgtctcctctttagcagaaaaggatttagggtctgagcccaagaatgtatagggatcactgcaggagaacagactgtagactgcaagtctgtagtcttcaaattatatgttcaaaagcaaaaacaaacaaaaatcaaaagagaaagaaacaaaatttaatgttcactgtacttgaattttcttttctttttttttttttgagatggagtcttttgctttgttgcccaggctggagtgcagtggcgcaatcttggctcactgcaacctctgcctcccgggttcaagcaattctctgcctcagcctcccgagtagctgagattacaggctcccgccaccatgcccggctaatttttttttgtattttttgtagagatggggtttcactatgttggccaggctggtcttgaactcctcacctcatgatccgcccacctcagcctcccaaagtgctgggattacaggcatgagccaccgtgcccagcctgtacttgcattttctagtgcacaatagaacagccttcactgctgaccttgagtaggtactgattggttaaaattaagtactacattaagtcttctgtgaataatagaatatatagcttctttttttttttgagacggaattcccctctgtcccccaggctggagtgcagtggcgcgacctcggctcactgcaagctccgcctcccaggttcacgccattctcctgcctcagcctcccgagtagctgggactacaggtgcccgccaccacgcccggttaattttttttgtatttttagtggagatggggtttcactgagttagccaggatggtcttgatctcctgaccttgtgatccacccacctcagcctcccaaagtgctgggattacaggcgtgagccactgtgcccggcctatatatagcttcttagaactgtttgaagactggttatgttgccagctactctgtctttttatctttttcctccttgcctcctgctataagatattttggaaattaaccagatttataatcaaattctttttcagggcagcctaagtgaaatctggaagctcagcagtccaggagcctctttttttttttttttttaatttatttttgtttatttatttatttacttttccaaaggcaggggagaggcagggtccaagtgtagttactgtttgaaaaggacctgccgggcgtggtggctcatgcctgtaatcccagtactttgggaggccaaggccagcggttcacttgaggtcaggagtttgagaccagcctggccaacatggtgaaactctgtctctactaaaaatacaaaaattagccaggtgtggtggcatgcgtctgtaatcccagctacccaggaggctgaggcaggagaatcacttgaacccaggaagtggaggttgcagtgagccgagatcacgccactgcactccagcctgggcaacagagtgagactctgtctaaaacacagaaaagaaaaggacctgaggccaggcatggtgggtcacacctgtaatcccagcactttgggaggctgaggtggtggattgcttgagcccaggacttcaagaccagcctgggaaacatggcaaaaccttgtctctacaaaaaatacaacagttaaccagtcatggtggcgtgcacctgtagtcccagctacttgagaggctgaggtgggaggattgcttgagcctgagaggtcaaggctgcagtgagccataatcacatgagcctggaagacagtgagaccctgtctcagaaaaaaaacgaagaagaagaagaaagaaaaggacccgaatttcctccacttatagttaaatgttgtgttgttttgggatttactcagggtattctgttgcattctgacaagagctttgtgggaaggaggcattcagatttctccttccatccttaattatcccatgatgtctacctgctagcctctcatgacaaggaattgctgatttttcagaataagcaaaaatcatccttgtttaaacttatttatttattttttgagatggagtcttgcactgtcgcacaggctggagtgcagtggtgtgatctcagctcactgcagccgccgcctgccgggttcaagggattctcctgcctcagcctcccgagtagctgggactacagggatgtgccaccatgcccggctaattttttgtatttttagtagagacaaggtttcaccatgttggccaggctggtctaactcctgacctcgtgatcctcccaccttggcctcccaaagtgctgggattacaggcgtgagccactccgcctggcctaaacttgtttattgaatggaattttgtctcaaaattccagtcaacagaaagtggttcaaataattgaagatttttttttttctgatttttgttttgagacagtcttgctctatcacccaggctggagtgcaatggtgcaatctcagctcactgcaacctctgcctcccaggttcaagcgattcttgtgcctcccaagtagctggcattaaaggcacccaccaccacgcctgactaattttttttgtatttttagtagagacggggtttcaccatgttggccgggctactctcgaactcctggcctcaagtgatctgcccaccttggactcccaaagtgctgggattacaggtgtgagccatgtgcccagccttttttctgtatttcttttttttttttttgagacggagtcttgctctgtcgcccaggctggagtgcagtggcgcgatcttggctcactgcaagctccgcctcccaggttcacgccattgccctgcctcagcctctgactagctgggaatacaggcgactgccacaatgcccggctattttttttatttttatttttagtagagatggggtttcaccgtgttagccaggatggtcttgatctcctgaccttgtgatcgcctgcctcggcctcccaaagtgctggcattacaggcgtgagccaccgcgcctggccttttctgtatttcaagagacaaaaataaataacttaataaatagataaatggggttttatttgccattcttttaaataacccacaataagaatttggtgagcaaattaagttttatataataccttggtggattatttatatgtttatccatgaatcagtgagtattcattttaatccctctgccctgtatacctatattactattaacattactgatgttgagtcactgtaaaatcttgaagcactttttggattattggtaaagataacatctcgctttttttttttttttttttttttttaggcagagtcttgttctgtcacccaggttggagtgcaggggcacaatctcgactcactgcaacctctgcctcccgggttcaagggattcccctgcctcagcctcctgagtagctgggattgcaggcacccgccaccacacccggctaatttttgtattttcaatagtgacggggtttcaccctgttggccaggctcgtctcaaactcctgacctcgtgatctgcctgccttggcctcccaaagtgctgggattgcaggcgtgagccaccaggcctggcctgttttgttttgttttgttttgttttgaagacagtatctcattctattgcccaggctagagtgcagtggtagtaccttggctcactgcagyctcaaccttctggttgcaatcctcccatcctctcaagcagttctttcatctcagcctcctgagcagctaggactacaggtacacaccaccatgcctggctagtttttgaattttttgtagagacaagatctctctatgttgcccaggctggtctgaaactcctgagctcaagtgaacctctgtccttggcctcccaaagtgctgggattacaggtgtgagctactgcctctgtcttgataacgtcttatcaacataatgtttagtgtatttgatgacatcctttttttttttttttgagatggagattcactcttgttgcccaggctgtagtgcaatagcacgatctcggctcactacaacttctgcctcctgggttcaagcgattctcctgcctcagcctcctgagtagctgggattatgggcatgcaccaccatgcctggctaatttttgtacttatagtagagacggggttttgccgtgttggtcaggctggtcttgaactygtgacatcaggtgatccacctgcctcggcctcttaaagtgctgggattataggcgtgagccactgtgcccagctagtgacatcttactttctacacaatcttatctgataattctgaataaatctgaacattcatgtaccaacatccccaactacctttttatttttggataaaacaaagtttcttagaactactgctgttatcagtagaactaacttccttcttgcgtttttgtctgtgaaggtgaagatacaagactcattgtgaaggggaaaaggcaaggtctatctcaaatatctcttcaatgaatttctttttttttcagatagggtctctcattttggtgctcaggctgaagcgcagtggtgcagtcatagctgctgcctcatcctcctgcctcagtctcccaagtagctgggactatagggatgtgccaccatgcccagctcatttttattttttgtaaatatagacttttgccatgttgcccaggctggtctagaactcctcagctcaagcaatcctcccgccttggcctcccagagtgctgggattacaggtataaaccatcacatttggccttcagtgtattttctacctgtaaagttatgttgcagccatgaagatttttgtccatcagtgcctctcatctgtgagaggcagttgaagtaggtatatagttataattactctttgtggggagatgaatgactctggcctttctctattctctcaagtccccatttctgtgtcatctgcctaccaacattgagatccttatatatgttattaaactgatatcttttttttttttttttttttttgagatggagtctcactctgtcgcccaggctggagtgcagtggcgtgatctcggctcactgcaagctccacctcccaggttcacgccattctcctgcctcagcttcctgagtagctgggactacaggcgcccgccgccacacccggctaattttttgtatttctagtagagacggggtttcaccgtgttagccaggatggtctcgatctcctgaccttgtgatccacccgcctcagcctcccaaagtgctgggattacaggtgtgagccaccatgctttttttttttttttttttttttttgcactctgtcgcccaggatggagtacaattgtgcaatctcagctcactgcaacctccacctcccgggttcaggtgattctcatgcctcagtctcccaagtagctgggattacaggtgcacaccaccatgcccggctaattttttatttttagtagagatggggtttcaccatgttggccaggctggtcttgaactcctggcctcaggtgatccacctgcctcagcctcccaaagtgctgggattacaggcgtgagccactgcgtgcggccttaaactgctatataaaggtaaattgagaagtatcattttaggatgggcaacgtagggagactttgtctctacaaagtttttgtttttgttttttttggagacaaaatttcactgtattgcccaggctagtctcaaactcctggactcaaacagtcctcccatttcagcctcccaaagtgctaggatcacaggcatcagccaccattcccggccaaaaaattaaaaaaaaaaaaaaattagcctagcatggtggtgcacgtgtagtcccagctacttgggaggctgaggtgggaggattgcttgagccagagaggttgaggctgcagtgaaccatgatcaccccctgcactccagcctggacgacagagcgagaccctgtctcaaagaaaagagaattatcgccaggcatgtctgtaatcccagcactttgggatgctgtggcggttggatcacctgaggtcaggagttcgagaccagcctggccaacatgacaaaacccagtctctactaaaaatagaaaaattagccaggcatggtggtgggagcctgtaatcccagctacttgggaggctgaggtaggagaatcgcctgaatctggaaggcagaggttgtagtgagctgagatcacgccattgcactccagcctgggcaacaagagtgaaactccatctcaaaaaacaaacaaacaaacaaaargtattaaaagataaaggacataaagtgttgggaaactccagagatctcctctttaaattctctataagtctcttttcaagcttttgttttgttgtttacctccctagtaagctaagccctaggagccatgatggcacttcttagcatttcaaagactgagaattagcttaacttttgttggtgtagttattaaggcatctaatgaccttaactttttaatattcctataccttattttccctcttggccccaatytcctgacaatccctgctcttatattttaggtatatgaaaagatggcaaaatgagtccttttctgatttttttttctccttttttgagacagggtcttrctctgttgcacaggctagagtacagtggcacgatcacagctcactgcagccttcacccccgggacaaaactttcctcctgaaatgggaaaagttcccttgtccccctcacagggcgtgcaatgggagtgtggctcacttcttcactgccctgctgctcagacctgtagggtaacatacagaggggcaggctatggggctccaaccccggcagtgtctaggggtgaatgcttacatctgaagccccagtgggtgtgtgttacagggtgctcttttagtttagctgtccttaggcggcttgtgttagctcaattagacccctgccttatcacaagaacagagggctttctgtatcccaaggttcttgtcttggtgtactggaagaattggatcaaatgtgggcttggagaatgagtgtaaggttttattgagtgaaagtaatgctcagcagattggggagccagaagggagatggttttcccctggagttcagctactcagcggcccaggctcttctccaaatgccccagccaaactctgcttcgttccacggcctgctggcatttgtcatgtgctcttccgccacgtgtkctcttctgccggcatgctcctctcaacgccctctcgaggtccagccgctgtgtcttcttctgccaatgtgttcctctagaagtccagccgcttgtgtgtctgcctgctagggtctggggagtttttataggcacagggaggggctgtggcaggccagggtggtcttgggaaatccaacatttgggcgggaaaacaaaaatgcctatctacctaggtccgtggacacaggcccctgatggagccctagccagggaccatgccctcctctacccagcacttcccttacccccttctgtatcatttaaagggaccacgttctctacccagcacacccgtgtcactcctacctcagcgtcccaagtagctaggactgcaggtgtgtgccaacacacccagctagttgtttttgtttttgtttttgtttttaattttttgtaaagacagggtctcacaatgttgccctggctggtctcaaactcctggactcaagcactcctcctgccttggcctcccaaagtgctgggactacaggcttgagccattgcacccagccccctttttctgattgttatcttctcctggaaagtgataaatgaagctatctttgtttcagtgaataatagaatatgaaatcctgtaaagccacataggttattagatgaatatcacagagcttattatgcaytatggcttaatgttagattatagatgtgaccaaatggtaattaacagagctggagctgtaattaaatactattatgctgctctgtgatctctccttagatttctgttgcaaagtaaatggaaaatgaatagttcaaacccataggtggatttcgtcgcttctccccatccctgaacatctcttttaattaactaagtaattaaataaagtcatcttcatacaacagagatgccaaactctgcctagtaactctaatcagtaagggtagtttgatgcatacttgttaatgagttcctcatgtgtatgagtctgttctgttattcttagtgatcagttcagctgaagtttcttctcttcacttattgtatagcagggtataatttggcagactgcttgaatgcaacagtgatgtttccaacctacattttaggtgttgttttctggatttcttggtgcaaaaytggggacttcattttatctagaatgtattagcatatgtttctcctagcctgccaggagcactgaataacctagcaggaaattaaactacttccagaaaagagctgtcctcagtggctgagagaaagtgtataggtgtctccctggggtaaacttccttctgtgcctagggttgctgcctgagctgtggaacaggttggcaataggacatgtgcaagcaaggcaatcagaaagttcacaggggtgacctggaaggtttaggccaatgtctgtgtccagtaggaccttgcaggaatttctcttgtgagtagaagaaagtataaaaaagggaacaaaccctaagcaaaagaagtacacatataggctgtgaaactgcttctgtcacagttcttccccaagagaaagaatagataaacagaggtgaggccaagagtaaagatgatctgtatattctgtctctaactttccctctctagtgactctcaagagtttgttccagcactgcagaggagtgagtagggaggatccagtttactttttctgtgttgttttttaccttcacttctgtgcatggaaattttaaagatctttccaggatctaccacatcccaagaaggttgggaaattaaattataaatgcccagttttcaagagagcaaatatgccttttggcatttatcataaatgtagatgattcattatacaggcttctacttccatttcatttcatgaaaaaggtggagttggggaagtacaaggggtgtgtgtgtgagacaagcagacaaggatgttttggcagctcttcagggaccagaattaatcagaatcaktgtatgaacattctgtggactcacaatgatgatctacaaatagtgatgactttctaagccaagaagtcagagccaactgtggagaatggatccggaacccagacctcagcctataggctagttttcaaggccaggaaggtgtttgtctctgtgtgtgttgtgggagggaaatggattatagatagagtgatagtcatgtagtaaattattccagaatcagagttttgttgcagagctatttagaagcttggcttacggatacatgtatgatcttctctgaatgtctctattaaaggactagactaagaagtctattaaaggacctagactaagaagtcctcacaaaggactctctattaaaggacctagactaagaattcctcacaaagggaagagtcccaaggattgggaaagtcccaatctttgactctcattttctaggtctgctgattagtatcatacttaatcttcggaggaaataagccagtgtgtgcattgagtgtctttgcatatgcaagacgttatgctcattcaggattggggcatcaatcactcgagcataatagactttgtcagcctcataaattctgggatttaaagagttaaaggatcactgcccacttcatttcattcttttttttttttttgagataggatttcactctgtcacccagactggagtacagtggtgcaatcatagctcactgtagcctcaacctcctgggctcaagtggtcctcccacctccgcttctggagtagctgagaatacaggcatatgccaccacacacagataccttttttatttttgttttttatagaggtggggtcttgctatgttacccaggctagtcttgaactcttggctacacgtgatcttcctccataggcctcccaaaacattaggactacaggcatgagccattgcacctgacccatcacaacttttatgttgtctctagatgkgttgcattcttcttggaacctaactaattacattcttgtgagaggttctagtttctggttttggaagcaaattgcttctttcttttttttttttttgagacgatctcagctcactgcaacctctgcctcccaggttcaagcgattctgctgcctcagcctcctggatagctgggattacaggcgcccaccactacgcccggctaatttttgtatttttagtagagatggggtttcaccatgttagtcaggctggtctcgaactcctgacctcaggtgatctgcccacctcggcctcccaaagtgctgggattacaagtgtgagccaccgtgcctagccatgtttgactatttctatctatgtgtacataatcaacaacatcttcagactgctgttgaytggcttctgggtggcaacagcacctcctgtttcttatagataaatttgatgttagaattatattccaagatgccattctcattaaacaaccactgttacatgttacagtttctaagggttagaaattcccaccaggttaatcccagccctgctataactttattccttctagccaaagatgtattaaagcacctaggatcattaggaatcatggcattcctaggatttggctatttcttcctctctttatccccacccaaattcatggattttatgccagactaatgtactgtttgctgaatgatagattggtaggaagcatagtggtggtagcaaaacatacctcagatgctgggccttgtctttctcatcagtctgtgtgctctgttactattgaaatctggccctgattctctttcattagagactttttaatgagatgaggaaaaaatagaactttttaaaaaacattttagccaagtgcagtttatgaggaagatcattaagaagatcattatacgctcattaataagagtttctcttagcacaggatgttctcatctaaaccactagatttgtagtggtatcataagccagaacttgaaaggaagaaccaaagtcttatttatagccgtctgcactctggcaggaatagatataggactagattaaatacagaaaaggtatttcctctaaatgttctccctgcaactcagctactactttttcttccctccacagatggagtcccctgtttccacaccagcagtgctgccaatacaccttttggtgccagtggtcaacaatgacatctcatctccytgtgagcagatcatggttcgtacccgatcagttggggtcaacacatgtgatgtggctctggccacagagcctgagtgcttgggcccctgtgaacctggaactagcgtcaaccttgaaggcatcgtgtggcaggaaacagaagatggtaagtgtgatatgtggctttcccctcccttctcaacctgcttctgcaggggagccaccagggacttattgttgtaaatattaccaagtggttattagagtctcaagtgtccacagtctgcgggagatacccacacagaggattttagcagacttagcaaaatttcccagcttctagagattcttcccttcatagtattcaacagtgttgatcctggtacttatgatatgcagtcatgtgataggtattggccaggtaattcaaactgtatctgtactctccatattttatatgggagagttagattataaattaaatttgaggtcaggcctgaagagaaaaattaataaaagggcagctgagggagtcaagaggatggagaatagtcactcttaaattcacttaatgttggctcattgcatatgcagctcttgccttttttaacacctataggtacagccagttcactcttcccactgattgcctcattgcccagccacccacaccgcttcatgtatctgtcacttggtacagattttataggaaatgtttagatggtcttgttttcaggcatccactaagcagttggctcactgtaggttgctgttgcccaaggcatccagacttcttgcatgttccacttgcccctgagaacggaatctattctgttttgaaaatttatgaacctgaaaaaatggaaggaagtgtaaagagacttaatggggtatttcagatcttttggtaacatctggtggcaatttgatttttgcatattctttttctgaagaatccaaatccttgtcagagtatatgtggttagagagtctgggcctcagtcccatcatgtctctgcatcagtaaacagactttcaaactgtcctcactctgaggagtttagaggcccagaggagcacagctaatcatctctgattatcacagagctattttgtcagtctgcccctagaaattcaggcatttcattctggtcattctaataaaatctgttcccctgaatattttgttgtcattcagtatttatttaaagtttaccgtgcaataggtgctgatgtgttacaggttaagaactctgtattcttgtctgtgtcatcattaggaatgtaatacatcttcagctttcagaataacgtcgctaatgaggttttattgtgtgcctgagtggtagaagctgatgcagagaaggtagagagagagtttaactctagaggttgactctggatatgtgtatacaatatacaatctgaaaatcacaaagtggctatctgatttttaaaatgtcatctgcttatggacaaatgtctgaacagtcacagagtctgttggaatgacagacatatccggaccatatctctgtgccaccaagcaaccttcaaggcctcttacctcagtatattgaagatagaataaatcgatttcctgcctgtttgttctgcttgcctttatgatggtgactcttttccaagaacaagatgctttttttatgtgaacctaacaaaaactttgagagagtgaggctaatgctttcactctcctgaggacaatgaatacctttttatctgaggatcccttcctgccagggcaaaattaacacataatttttttttattttttgtaaatcgtttgcactggaagactctctgtcaggttgtcacaggcagcctattattaccaagttcccctgttacgtacactttttttttttttttttgagatggagtctcaccctgtcacccaggctggagtacagtggtgcgatcttggctcacggcaacctctgcctcccaggttcaagcgattcttctctctcagcctcctgagtagtggggactacaggcacataccaccacgcctggtccatttttgtatttttagtagagatggggtttcaccgtgctggccacgctggtcttgaactcctgaccttgtgatccacctgcctcaacctcccaaagtgctgggattacaggtgtgagctaccacacccagcccagtttgtactcttaaggtactctatactttatttcatagcacacatcacagtttgcaactttgtttatcatttttatgatttttctattaatgtgtatcttttctactgtgttagaagttctgagatcaggcagtctgttttgctcatcattgtatccaaggtacttaacataggtggcatctgacacctatagtagtagactgtcaaaaatacttgtttgaggccaggcgtggtttatcacctgaggtcaggagttcaagaccagcctggcccacatagtgaaaccctatctctactaaaaatacaaaaaaaaagctgggtatggtggcgtgtacctgtaatcccagctacttgggaggctgaggcaggataatcacttgaaccccggaggtggaggttgcagtgagccgagatcgcaccattgcactctggcccaggcaacagagcaaggctgtctcaaaaaaaagaaaaatatatttgtttgaatgaaggaatgcttgcatctatgtcattgtcatttctggatctatcttaatatatatctagaggagccgggtgcggtggctcaagcctgtaatcccagcactttaggaggccgaggcgggcggatcacgaggtcaggagatggagaccatcctggctaacatggtgaaaccctgtctctactaaaaatacaaaaattagccgggtgtagtggtgggcgcctgtagtcccagctactcgggaggctgaggcaggagaatggcgtgaacccaggaggcgggccttgaagtgagccaagattgcaccactgcactccagcctgggtgacagagccagactccatctcaaaaaaaaaaaaaaaawawatatatatatatatatatatakagagagagagagagagagaggatattaaaatattgcttgaacttaggaatggtgtcgaagtactttccaaaattctaaatcttctctgcaactcagaataaatactgctttcaccaggtttgagatcagtctcgttgtctaaatctgtaagatttttaatcctacttttaataccaggttttctcccacttactgtatttcaaggcttaggtctctttctttattttattctctttttctgaaagagaactgttcagcaataatatactcatcttttctttgctttctggtcaccccagagggccttcacctgaactgtcagttggcgaaggtctgaattgggatcagagttggttcacattccttttcatcttcaggtaacagagatttcctgcaaagatcattctctgaagatctgtaagatccaggataccgagtcagtcctcaagttaatcataagaactacatacagatactttttaaaaaattcttccagacttctaggtttttttttctgcctctcgacattttgtacttctgtctgtctctttgtccagcaaactacactgtcttcaaacagaaaagtccttacagctcagagagaagctgtgaatgcttggcctctgaggggaatggaggacactgaggtccctgtagaactgagccaccttgctgagaacaggtataggagtcatggcctcaattattcctagtttctttgcctacttgtcctacagtgttacttctttctttcctcttctctccctatcactccctttaaaccttggatgcatttttaaattcctgcagattccatttctttttaggctgttgataattcagtaagcactgcaaagatcctacttgactagattcaaccgtgggactgttaagaagacccaagtgtaacctagaatttttttgtctgtttgtttttgagacattctcagcactatgtaagggctagttccactggattttgctttatctcacctcacttcaaatcaaaatactgagtatgtccgaggcgggaggtacacttgaggtcaggagtttgagaccagcctggccaacatggcaaaaccccgtctctactaaaaatgcaaaaattagcctgtaatcccagctacttgggaggctgaggcaggggaatcacttgaacccaggaagtggaggttgcagtgagccgagagtgtgccactacactccagcctgggcgacagagagtgagactccgtctcaaaaaaaaaacaaaaaaaaacaaaacaaaactaccaagtctattctgggttcacaaggcttaactctaatctaggatcctgaaaaaatgtataagaagccttaaagcagactatgtacttttagggacacaaaattgcatactggcttgtgtggtattttaaagaaaggcaaggctgactttaggtaagagttctaggagatgctataggttctcctttttggacagtagcactaacccaaaggccaataccagtgatgtagtttactttggcaaatgtgctttatggaagaatttatggtatagtggaaggagcactggagtaaaactctggagacttctatatctctgccactatcattatgaccttggaaaaatcccttaattttctgggccttagttacctcatctcttaagttgaactaggtgaccaattaggacctgacagttctttttagytctttttttctttcttttttttttttttttttttttttgagacagggtcaagctgtgtcacccagcctggagtatagcaacaacatcatctctcactgcagcctcaaactcttgagctaaagtgatcctcctgccttggcnnnnnnnnnnnnnnnnnnnnnnnnnnnnnnnnnnnnnnnnnnnnnnnnnnnnnnnnnnnnnnnnnnnnnnnnnnnnnnnnnnnnnnnnnnnnnnnnnnnnnnnnnnnnnnnnnnnnnnnnnnnnnnnnnnnnnnnnnnnnnnnnnnnnnnnnntgggaggctgatgcagatggatcacttgagcccaggagtttgagactagcctgggcaacatagcaagaccctatctctacaaaaaaaattttttttaaatctatgccttaaaccatggaatcagggccaggcacagtggcttgtgcctgtagtcccagctactcaggaggctaaggcaggaggatcacttgaacccaggagttcgaggcaacagtgagctatgattgtgccactgcattccaggctgggtgacggagtgagaccccatctcaaaaaaagaaaagaaacatgtaatcagcatggatccaacactggttgactatggcaacttaaaaacgaacaagtggacgggcacggtggctcacacctgtaatcccaacactttgggaagctgaagcaggtggatcacttgaggccaggagtttgagaccagcctggccaatatggtgaaaccccgtctctactacaaaaattagccaggtgtggtgatacatgcctgtaatcccatctgaggcaggagaatcccatgaacccaggaggcagaggttgcaatgagccaggatgtgagagaatatgcggctgtctgtagaacaggaggagcagagacttttttgagacagagtttctctcttcttgcccaggctggagtgcaatggcgtgatctcggctcactgcaacctccacctcccgggttcaagcgattctcctgcctcagcctcccaagtagctgggattacaggcgtgtgccaccacacctggctaattttgtattttcagtagagatggggtttttccatttcggtcaggctggtctcgaactcctgacctcaggtgatccccctgcctcggccttccaaagtgctgggattacaggcgtgagccaccatgcctggcccctgctcactattgtaataacatcctgtcatcagatttcttctaccaccatttgactgaaatatttctcataccagttttccagaggtcttctctcagtccttcctagacttctattagctctcttatttctttattcttgaaactctcctctcttgccttggtcataaatctcatttctctttataactggttattctctctattttgtgccagtctctcttccttcttgtattcatttaatcagaaattcctgttgagattcaggatgctgaaatatcggtcaattcagtcctatcagccactagatagggtctgtagcagctggtgccctgctccctttcccacaggcaaacagccttatccacaatatattttttcatttactgtgtgtgtcatagtggggaaagttgaggaaacattgagttaggaatggcatttagctgcttggagaagaaatgaaactataataatgatttaatataagagaatttggaggtaggtaggtaagtagtctagggctggtatgatgacatcgcaatggaatcactgtttcaggctccttaaagttacttctttattgtaaaattgcttctgtagctccagccatcatgtttactttccagtcttgaaagaaaaggaaggtagaagagaaaaagcacctgcctcccatcttagtctgttacctttggagaggtttcccagaagccacaccataagacttctgcttacatcttgttggctaccctgtgtgcaaggaaggcaaagaaatttagccttttagctggatacattacttccccgcacaaaataggggctcttactaagggaaaagggaagaaattagtagaatctgccactcttctgctttgcatagccttcctacatcataacttccaaaagctattactttagcagctttctattgtaagtactctcctatatattcatatctttagctgtctaccttgtgtgaacaataccgagaactttatctccacacttgaccttttgcctaatacagtttcactgatgaacatcaacagaaactgatttattaaattcgaatgtctaaaaaggagtattcatcattttttaccaaaaatttccttctctttccttctctgtttctcttcattacacctacattaccatcctcctaattttcttttttctttttttttttttttttgagacaaagtctcgctctgttgcccggggtacaatggcctccacctacggggttcaagcgattcttctgcctcagcctcccaagtagctgggattacaggcgcccaccaccacacccagctaatttttgtatttttagtagagatgggttttcaccatgttggccaggctggtctcgaactcctgacctcaggtgatccacccgcctcggcctcccaaaatgctgggactacaggcatgagccaccatgcccagtaccatcctcctaattttctaggctcaaacctccctagtcatctcttgactcttcactcttcatctctgtataattttttagtggtttctctaggaattacagtatatatatttaacttttcacagtttacttaaaattagtacctcaagtggaatgtagaaatcttactaccatataagtcccttgactctccattcttttttctttttgagatggagtttcactgtctcccccagctggagcgtagtggtgtgatcttggctcactgcaacctccgagaagaaatggagtttcaccgtgttagccaggcttatctcagactcctggcctcaaatgatctgcctgcctcagcctcccaaagtgctaggattacaggcatgagccactgcaccaggccttactctccattcttttgttttcttttttgtttgtttgttttgtaaattattttatttcttccatgatgatttagaggcactgtcttcaaaccaatacaaatatttcataaataatatttggctgttttctaaccagttgagtaacttgttgcacaataagctacttcacatctttcagcaagaaatacattaaatttgagtagtaaagacattacataatgaattaggacacaattaaaatttgctttaaatatttttttaggggagaggacaccacacttctactcaatgaagagaaacatttttacagtcctgaggtcttttatttttttaacacccattatgctgtgaatttgtagggaagaggttccagcagttcaggctccttcccattggttctcacaaagtgtgcttctctgggtagaggctgctgcttcaggtgaacccagatgcctttctctttggcttctttctttttctgatcatttttccttcacatgtttcaggaagctatcttggcttttagagagtgagtgcttaatgtgctgaatacacacattaattctcttggcaagaatcttgcccttgtttgtttacaacaatgccaacagcgtgctgggggacactgtagactcttccagtttagccgtggtaacacttgtggggcattcctttttgaacagtacccattcccctgatgtctacaatatcacctttcttatagattcgcatatacatggccaaagaaacaacttcatattttcttttctttctttttttttagacggagtttcgctcttgttgcccaggctggagtgcaatggcgcaatctcggctcaccacaatctccgcctcctgggttcaagcgattctcctgcctcagcctcccgagtatctgggattataggcattcgccaccatgcccagctaattttgtatttttttttttttttttagtagagacggggtttctccatgttggtcaggctagtctcaaattcctgacttcaggtgatccccctgccttagcctcccaaagtgctgggattacaggcatgagccaccacacccggccacaactctatattttctaagagacctagagaacatatattgggtgcctctcttcttaacctttgtgtttgtccactggaagatggcagttctggccgaaaggctctccattatttatgttgtagttgtcttacagtagcacattgcctgcttttgtatggcttatgagctaagaatggcgtgtgtgtatatatatatattttttgagacagggtcttgttctttcaagacgggagtgcagtggcaagatcactggctcacatacagtggcacgatcatggctcactgcagcctcagcctaccaggctcaagtgatcctcccacgtcagcctcccaagtaagtaggaccaccagagcatgtcaccatgcctgggtagttaaaatttttttttggtagagacagtgtcttattacattgcacaggctgatcttgaattcctgggttcaagcaatcctcccgcctcacctcccaaaatgctggtattacaggcatgagcaaccacacccagcctctattttttaatagttgaaaaaatgcaaaatccaacaatatttgtgaggcatgaaaattacgtggaattcaaatttcagtgtctataaataaagggttttttgtttgtttgttgtttttattttattttttatttttatttttttgagacagagtcttactctgtcacccaggctagggtgccgtggtgcaatcttggctcactgcaacctccacctcctgggttcaagtgattctcctgcctcagcctcccaagtagctggaatcacacgcctggctgattttttttgtatttttagtagagatgtggtttcgctatgttggccaggctagtctggaactcctgacctcaggtctgcctgccttggcctcccaaagtgctgggattacagacgtgagccaccatgcctggctgttgttgtttttgttttgtttttttcagatagagtcttggtttgtttcccaggctggagtgcagtggtgtgatcagtggtgtgatcatggctcactgcaggctcaagtgatcctcccagttcagtctcccaagtagctgggactacaggcacacaccaccatgcccaactaattttttttgttttaattttttttttgtagagatggggtctcactatgttttacaggctggtttcaaactcctaggctctagcaatcgtcctgcctcagcctcacaaagttctgcgattacaagtgtgagccatcacacctggtccataaataaagtattgttttgtttttttttttctgtaacctattagaagtgacacgttttgttttgttttgttttgttttttgacacagggtctcactctgttgcccaggctggagtgcagtggcgtgatcacagctccctgcagcctccacctcccaggctcaagtaatcctcccacctcaacctcccaagtagctgagactacaggcatgtgccaccccatctggctaattttgtattttttgtggtgacaaggtattgccatattgctcaggctggtctcaagctcctgggctcaagtgatccgcccacttcagcctgccaaagtgctaggactataggcgtgaaccactacacctggcctataatattttcttacggaaatgagatctcactgtgttgctcaggcttgtcttcaactcctgggctcaagcaatcctcctgcctcggcctcccaagatgctgggattacaggcgtaaggcactgggcctggacccataaataaagttttattggaagacagtcattctcatttaatgtattttgttcacatttgccctacagtggcagagttgagaagctgtaacagagaccatgtggcctgcaaggcccaaaatatttgttatctggtcttttgttgaaaaagtttagccaggcatggtggtgggcgcctgtaatcccagctactcgggagtctgaggcaggagaatcgcttgaacccgggaggtagaggttgcagtgagccgagatagtgccactgcgctccagcctgggcaacagagtgagactccatctcaggaaaaaaaaaattattaaaaaaaaaaatgtttaccaatctcatgcctcrtatagccaccgtgcctggccaagggtctgaatgtttaattttatttaatttaaatttaaatagccatatgttaactagtggcttatggtattgacagcacaggggctagatctttaaaatatatatacacagacatgcatatatatatgtgtgtgtgtgtgtctgtgtgtatatactctgagatggaaagaagagtaattgtgtgggagtatgaagagggtgggtaagtagctgacatctaaacagacccatggtgacttctgtgtactctggcccctgttacccaggagaacattcggccctacttcaaactctgtggttgagccctttgctttggtctgtgggctgcagttttctcattatcagagtaataggctatggttttgcttagcaggaagttagtctgcctgtggtagctccgctgagaacctgccccagctattcttcatcctcatctgattgcagatcccagctgtgggcttttatccttttcactaaagggaaggggctctccattaatcttctttcatggaaatggtaaccttggtagttactcttggtttttcctgtgtgattttgatgtagaaaagtatgtgtgtgaactgtgaaatatctaattttagatatttgcactagaaaagtaaggtggcattcagctattggtttttctttctcatatgctataattaatgccccttcaccttcagtcttgccccaggcagtactcacctagaggagagatggggcacagtaacaaccaagctttctccactgtttagccagttgcatactagcttgaatcccgaagaaatagctctaccaatagcacagtcataaagagcctagcagccattgtctgacaccacaaatcttcatagcaacagaccaccacatggcaacagcagccacacaaaggaaacattagggaaatcagtacctactttctcccacccctcccccaccaaaaacaacagccaacacattcccacctagcagcttactcccagaggatactttagggcagtgacgtgtttatatacctttgtggattgtgttatatgtccactgtcatacatttaaatcctgaagaccttgggaaaaatttcagtcaccggcttttttgagtttcattttgcaaatggcaaaatagactaatctccaggggagaaagagagtctccctttgtgcatgctcacacacctcctccctcccccaagcaaagcacagtcaggcagtatatataggtgactaggctgtgagcttgccagataggtaaggttgtttgcaaatgagattctttttatatttcagtaacaaaacccagacctattttgttatcaaaatcatcctgatacttaggaatttagttgagtgatacctaggcaataaatatcttactggtattgcctgggattaatcattagccctaactaacttagctttgaagtgtgattcaaaggggaaaaagtcctatttgagagccttggtgttttcttgctctgttaataaggtcgtttgactatctgggccttaatttccttatttgtaaaatgaggaggttggactacatgatctctatgatccttctagctctgatatttacaactctgtaatcatttatgtggaatagaagagggacttgtctttgttagtcattggttgtgatgaaatctgctggaagatgttgagccctctggtcttagtgcttacactgctaaaaacaggtcctggccctgccctatttgataaagctgctgtaacaatgataggcagaagctattaacaaagttggcaactagccttttctcccacagcagtagtttcagactagttcaagcagagctttgctcccaagctattgctactgaggctgctgctgcctcttaatgataccggtgagaactaactccatttctctctttaactcgctctctctctctctgactactctatgaaacaaggggctgttctccacctcttctgatacctcattattccatctccctcaggctttacagaacaaagaaatcacagggcatcaactttataatttaggcagctggagataatttcaccaggatagggtgggtaggtagctgattcctcctggcattaggcagcattgctaagtggccttgtgttttgtctgccaggcttaagctttgttaggcccattcaggcttctctgtatttcaattaaattatagtggtaaaccaagcccatgtactttcaaaggggtaggggttaggaaaaacaagaaaagtatgtcatttataggccctgctactcactaattgctcaagaaatttttgtttaatctactatccctgtgcttactcctgccagatcctttatttcctttagttgctgccttcacggccttctccatagcaacaagctatatgacaaaaaggctatggtgagaaattgagcagtcacccctccccgaagttgtactctgttttctccttagggtatctaaaagcagcccaaaagactgctgtcaaataattttctacccscattgaactcataatcaaatgaaacttttaaccctgaactaatttggtgaacaacctgcattctccttatttgactctgattatccctaccttttgaaaattttctagatcattcaatatacttgaaatattgtgcatattctcatttatgaagctcccttttgctttttagctttcagcttactccttagaattatacagaaaatctcctggaatgaagtatggagaaagagtagatgaagaaagcgaaaccctccccttttctgccatgtgctgttgccttagatactagactagtcttctgccctagagattgggcaagctgcctgaagtatagaactggcctgcatcttggctgatcctggcatagcctaatctgttatcctttgttatcttcccagccacttgtctacaggagtcacaaacccaaaggttttgtttttgttttatattaataagtcttactgaaaataatataaacatgtacgcaaattctacgtgtgcaagtctgcattttcgaagtgaacacaccatgtgataccagcacctagatgaggaaacacagtattgccagaaccccaaaatctctttcatgcctcccttctaatagctagcccttctccccaccccaggtaaccaatctcattgttaataccatagattagtgttacccattttgaacttcatgtaaatagaatcattacagtatgagcttttttatgttgagctgttcaacattgtgccagtgagattcatccatattgttacatgttgttaaactttgtttattttcattatagtattccattatgtgagtatactgctacttattcagttgttgatggcatttgggttatttgcagtttgaggctgttataaaaagtgctgctgtgaaaattcttgtacatgtctatttgggactatatatacatattcctatctatctatacttagaaatggaattattgaatcataaggtatgtgtatgatcaacttgaatagacatcacaagtttcccaaaatgtgtaaaccaatttacattcctacttccaatgtattagaatcctgattgctctgtgttctagccaacacttgaccttatttgtctttttcattttagccattctggtggtgtgtagtggtatctcattgtggtattaatttgcatttccctggtgagtaatgaaattgagcatcttttcatgtgttcattggccatttggaaatctcttttacgaagtgtctgttcaagtcttttgcccatttttggattgggttgtatgtctttttcttattgatttgtatgaattctttgcatattctggttattagtcctttgtgagatttatgtaatataaatatcttctgtgtcttaacttttctgttaatggtgtctttgtcttcatttttatgtagtctattttatcttttttaaattttttgtttttcttttattgttagtgctttctgtgccctgtttaacaaagttttgcccatcccaagataatatattcttctatgttttttctgagaaccttgttttatatatatatatatatatatataaaatatatataaaaatacwtatatatatatatrtatttacatccacaatctatctggaatttatttttgtttaggatgtaagttggaagtcaagattcttatttttttatatggatatctaattggcccagcaccttatcaaaaagaccatcctttcccccattgcacagcagtgtcacatttgtcgtaaaccagttaacctgtgtgggtttatttatgggttctcttctgttccatttatacatttacgtattcttgtgtcaatactacattgtcttgataactacagctttgtaaatcttgttatctagtagtataagtcttccagttttgttgtacttcttcaagattgccttggctttacttggccttttgcatttccatgtaaattttaggatcatctttgtgaatttttacagaaaaaaaagtgctgaaattttgattaggatctacagatcaatttggagaagacccaaagttttatccttttacttaagctagtaaactcagcagttactgagggagaattggggggaggggggatcagagcaagtcactgatatcatttagggatcttgtttaaaatatatgttagctggccaggcaccatggctcacacctgtaatcccagcactttgggaggctgaagtggacagatttcttgagcccgggaattcaagaccagcccggacaacatggcgaaactccatctctacaaaaagtagaaaattagccaggcttggttgcaagcgcctgtggtctcagctacttggaaggctgaggtgggaggatcacctgagtccaggaaggctgaggctgcagtgagctgtgattgcaccactgcattccagcctaggtgacagagtgaggccctgtctcaaataaataaaataaaattaaattaaaaagttagctatctcctgctcctattctcaatcagcatgttcaagatggagcttggaaccaggtgcagtggctcacacctgtaatctcagcactttaggaggccaaggcagaaggatcatttgagcccaggagtttgaaaccagcctgggcaacatagtgagacccgtctttatttaaaaaataaaataaataagatggagcttggacttgcctattgtaaaaaatgctccccaagaaattatggtttgctgccatcaccactgttctccaccaaccctgtttgagaaccactgacttagactgcagtctagcagcaattcagtgaggctagttaaggtaaaatctgactgatttaatcaacaccacatctgcctttggggctrtattaatttcctgggctgctgtaacaatgtaccaaaaactgagtggcttaaaacaacagaaagttattatttcacagttcctgaggccaggcatctgagatcaaggtgttggcaggaccatctgtctcctgcagctctagggaagaattcttcttttcttctgctctttgctggcaatccatagtgttccttggcttgtagctgcatcatcccagtcacatggctgtcttccctctttgcatatctgtgtccaaattgctccattttataaggacaccagtcactggattagggcagaccctaatgaccttatcttgataacttgattgcctctgtaaagaccctatttccaaataaggtcatatgctgaggtactaggggttagaacttcaatatacctttttttggcaggggaagggtgggacagggacacagttcaattcataaaaggggcaaatgaaaatttcagaataattattgtcacaagttggagagagaagattttctagaaatgtgcataataatgagagacattgcttcccaaagtcagtctgagcagatcatccaccctctgaccccaactgttactgggttgagttcctctttttttgctttgttttgttttgttttgtttttttgagtctctttctgtcgcccaggctggattgcagtggcgcaatctcagctcactgcaacctccgcctcctgggttcaagcgattctcttgtctcagcctcctgagtagctggractacaggtgcctgccaccacacccagctaattgttgtattttttttagtagagacagtgtttcaccatgttggccaggatggtgttgatctcctgacctcatgagccaccgtgcctggcctcctctctctttttttaaatctacttattttattttactttttgtagagctgaaatctcactttgttgccctggctggtcttgaactcctgggctcaagcagcctcccatcttggcctcccaacatgctgggattataggcatgagccgctgcgtcaagacttgagttcctttctctgcattactatttacccttccttgggtaaatacacttgtgctttcttttttttttttactgagagtgaaagggtggttcagctctactctgttaacaaactctgaaacagtcaagtagaggttaccagaaagaaaaataggtttcagcagttggcagcatactagcctctggctgaagaaggccaaaaggaaaagtgcctcgcataagccaagcctagtcatattcttatcctagttccttctgctaggtcataaagcagtaaagctgtggacagtgggattccttctcaaccccaggcaagtattttttcaaagctgttccattgagatgataccatctttcttattcctagtggttttcagaggactccagctgtatagccaaaggcatgatgacctttgctgagccaccttctccagccatggctgcaggatatggttacctcagcaagaggaaaggaaggatatacgatttaagggtgtggtgaaacagcctttgtggcacttatgcaaagtttccctagtgtaagaatgtatagatgggaggaggaactgtgtcagattttttgcatttctcccatctttcccatttctcccatttgcacaccccatccccacagtgtgggtgtgaagtggtttacatttactggttattccactttggccttctctatcctgtactagtccttttcctgcctatagttttagcagtaccagatctgaatgctcttcaaattgacacttgcttaataatggtttcagctggctctctaataatacttttgcctgaaattctgttgagagaaaatactatggtcatgtgaaaatggttccaggatgatgggtgttagttacacttgtgctttcttttttttttttttttttttttttttgrgatggagtttcgctcttgctgcccaggctggagtgcaatggcatgatctcggctcaccacaacctctgcctcccaggttcaagcaattctcctgcttcagtctcccgagtagctgggattacaggcatgcaccaccacgcccggctaattttgtatttttagtagagatggggtttctccatgttgaggctggtcttgaactcctgacctcaggtgatccgcccacctcggcctcccaaagtgctgggattacaggagtgagccaccgcgcctggcctacacttgtgctttctttggctcctcgagtcccagaagatctcagaattaagggtttaagatttttgttttctctccaacccagacttgaaggtggacaaatttgaagacatcattttctttagcagtagtttccacattttgctgtacattagagtttgggagtgggagtttttaaaatcccagtccccagatctcacccaattaaattggatcagaataactgtgggtgggagccaggtgtcagtatttttttaagggtctccagagtctttgaacatttttacagactatcccaaattgcttattggatcatctgagatatttatacttagaatattaataaagaactcctggatagtgtatagattctctttggaagtatcctctctaaaggaacagtaaccacatttctgcctttaggtttctggttttggaagactcgtacgtaatttgacccttccttacagtcagatccatgaattgaggatgaatggtttgccaggataagtaggataaaaacctagagatgttgctgttaatctgattggaggttctgcctacatgaaatttggtagggcatgagtatttatagcatggcaaaagcattctctctaataatttgcattgcagcaacaaatttggagctaaaatacaggtttttggtttgtttttgtttttatttttttgaaacagagtctcgttctgtcacccaggttggagtgcagtggtgcaatcatggctcactgcggcctccaactcctgggctcaagcaaccctctcacctcaacttctcaagtagctggaaccacaggcgtgtaccaccatgtctggctaactttttttttcttttgtagagactaggtctcgctgtgttgaccagactggtttcaagctcctgtcctcaagtgatcctcctgccttggtctcccaaagtgctgagattacaggtgtgagccaccacgcccagccagtatgacagtttaaaaaaaaaagtttgaccagacacagtgactcacacttgtcatcctagcaatttgggaggccaaggtgggaggattacttgagcccaggagttcgagaccagcctctgcaacactatgagacctcttctctaccaaaaatcaaaaaaattagccaggcaagtggcacactcccgtagtcccagctacttaggaggctgaagcaggaggatctctcgaatctgggagatcgaggctgcagtgagccctgactgtgccactgcactctagcctgggtgacagagcaagaccctgtctcaaaaaataattattattataatggttttcattttctgtaaatctaaaatttttttaaatggttttcagataacaactatgcaccaatttaagaagaaaatcttagctagtacgtaaccacacatggtctaattctttctagtttcttcatttctggaggcaactcactcttggaagtttctgaatatatttaccctttctctacatctctggtttgaactttcatcctggaggaaatagcgctcataaatgcacatactctctaatcacatgtcaaagttaattattagacagtaacataccagagatcagctgtgggaaggaaacaatttctacattctcccatctgaggcttctgcagaggtagtagcatgtagagttccataccagccttcctcacaggcatcctcttgcaactctccctcagctctcagtcctaccaatttcctgcaacattccttgctgcaggcgtgagccaccacacctggccagaaactataatttatttactttcatacgatctgtttctccacctcaacctctaaagagaactagaaaactggagtgggaaaactttagaaaactactagtactgactgggagttgaggtattggttgtagctgcatcttcctccttgcccttactccgaacatcagtaaacaaatatgtctgtcattctcctttagaaataaaaataggaactacatagacaccattaacaggtttttgatcatttagtggtggttaaaaggacctttggccattataagaggtctagagagagtaaagaggactttactaggaaagcaaagagaagaccataactgaaggcatattcaacttctagagaataggaccaaattgaacaacaatttggcaccagtgtaaagtgtgtcagcaacaattattaatatttattgttaactattcatactagcactggacattaggcttaacacttactatttttctgaccaagctaaggaaatacaactttcaagggaacaaggtaacaaagtaggccaggtgtggtggctcatgcctgtaatccctgcactttgggaggctgaggcaagaggatcacttgaacccaggagttttagaccaacctgggcaacatagcaagaccccttctctatcaaaaaaaaaatttttttttaattagctggacatggtagtatgtacctgtaatcccagctactcaggaaactgaggtgggaggatcacttgagcccaggaggtcatggctacagtgagccatgatcttgccggtatactctaacctgggcaacagagcaagaccctgtctcaaaatatatgtgggaacaagctttttatttgtattatttatttattttaaacaacaacatcttgtccaagacaaattttttttaaaaagaggaaaagaataaagaaaaagaaggccaaggccaatggctcacacctataatcccagtactttgggaagactgctttaagccaaattcaagaccagcctggtcaacatatagcaagacctcatctctacaaaaaaaaatttaaaaattagctgggcatgatggtgtgtgcctctagtccttgctactcaggaagctgaggagggaggatcacttgagccaaggagtgtgaggttacagtgagctatgatcacatcactgcactccagtctaggcgacaagagtgagaccctgtgtcaataaaaaacaaaaagaaaaataataaaaagaatcagaggtctttaaaatataacagatgatggatccagtgttacatacctaagtatacctttaccasagcttctgccttgatatgtgagtctgagggttcaactgtaaattgcagaaaacttataaaatggtttggtgcccaaggactgttgctaagtcttgcatgtaagtccaaagtggatactatccaagtgacctgcaatgccatccatagatggtgggcaaaattgatggatgagctcttgatccaatgggtagctttgtttttattatacatgtctttggaccaggcaatcatctactaagtcacattataataagaagaggagtatgaatgcttaaaacagactttgttagctacccttactgtgctttgaattcaaagcataatttcagagataatgagctatatcttctcctaaattttctctctctttcttttcttttcttctttctttctttttctttctttctttctttctttctttcttccttccttccttccttcctttcttccttcctttctttcttcctttcttccttccttccttccttcctttctttccctccctccctccctccctcccttccttccttccttccttccttccttcctcaggctggagtacagtggtgcagtcttggctcacagccacctccatctcctgagctcaagatatcctcctacctcaaccctctaggtagctgagactacaggcgtgtgccaccatgctcggctaatttttctattttttgtagagatggggtctcaccatgttacttaggctggtgttgaactcctgggctcaagtgatctgcctaccacagcctcccaaaatgctgggattacaggcatgagccattgcactcggcgtcctacattttctgccccacaactagcaactgttttttcctctgatttttttttttaatttttgaaattattttattatttcaaaagtaatgcctgattttttagctatgacaccaaaagcacaagccagcaaaagaaaaattagataaattggatttcatcaaaactaataacttttgtttatcaaaggatactaccaagagaataaagatagaatgagagaaaatatttgcaaatcgtgtatctgataagtgattartatctagaataaagaactcctacagatcaacaatgaaaaacccaaacaacctaattcaaaaatgcgcgtaagacttgaatagacattttgccaaagaagatatctaaatgaccaataatcacatgaaaagatgctcagaatcattaattataagagaaatgaacataaaaaccatgatgaattaccacttcatacctactaggatggttgttatcaaaaatgtggaaaataaaaagtgttcaagaggatgtggagaaattggaacccttgagaactgttggttggaacataaaatgagtacaagccattgtggaaaacagtttggtggatcctcaaaaagctaaacagaattaacatatgatccagcaattctactcctaggtatatacttaaaagaatggaaaacagatgttcacacaaaaacttgtatgtgaatatatgacagtattattcacaatattcagaaggtagaaataacccaagtgtccatcaacaggtgaatggataaacaatgtggtatagccatacaatggaatattattcagcaaacaaaaagaaatgaaagctggtacagtgactcatgcctctaatcccagcactttgggaggctgagatgggaggatcacttgagcccaggaattcaagaccagcctgggcaacatagcaagactgcatctctagaaaaaaatacaaaatggcggccaggcatggtggcttatgtctgtaatcctagcactttgggaggccgaggtgggtggatcagcagaggtcaggagttcgagaccagcctagccaacatggcaaaaccccatctctactaaaaatacaaaaaaaattagccaagtttggtggcacacacctgtaaccctagctacacgggaggctgaggaaggagaatcgcttgaacctgggaggtagaggttgcagtgagccaagatcgtgccactgcactccagcctgcacaatggaaacaagactccatctcaaaaaaaaaaaaaaaaaaaaaaaactgggcacggtggctcacgcctgtaatcctagcactttgggaggccaagacgggcggatcacttgaggtcaggagttcgagaccagcctggccaacatggtgaaaccccatctctactaaaaatacaaaaaattagctgggcatggtggcgcatgcctgtagtaccagctactcgggaggctgaggcaggagaatcgcttgaacctgggaggcagaggttgcagtgagccgagatcatgccatggcacttcagcctggatgacagagggagactctgtctcaaaaaaaaaaaaaaaaaaaaaaatcaacctggtatggtaacacgtgcagtgataaactcattatcactgtataggatgttgtcagttaggcttacttagtactcccagctactcaggaggctgaggcaggtggattgcttgagctgtgatcacaccactgccatccagcctgggggacagagtgagaccctgtctccaaaaaaaaaaaaatgaagttctgattctacaatgtggatgaaccttgaaaatacatgttaagtgaaataagccagtcacgaaaggacaaatattgtattttttccacttaggtatctagaatggatacatttatatagacagaaagaatattaagggccgtggggagcatagggaatggagaattattgcttaatggctacaaagtttctatttcaggtgatgaaaaagttttagatattgtgatggttcaaaaggaaaaagtaacaatttttattgttgaacatttaggagacaaagtcaaaattcaccaagaggaaaagaataaattacccagagataaccaatgtttgaatttttatattatatatttttgttgcttcttttattttatatttttaacaaattgagacccttctctatatatttcgtaatcttctttgtttagagaaatatattcctgtaacatatttccataacattaaatgaccttctataacattttaaataactacagagtattccatgttaaggatgtatcataatggacttagtcattatatcttttatatggtttaaaaaaagatacttcttaaattttctagctcttcaagagctgagcttcattttttacatcatcaataaagtacctcacataccaaggagacacattatgtgtttcataataataaccttgcagctttggacttttcggtttttgtccaaactcccttttctctttttatcctcttgctgcattttgcctacttggacattttctttttgcttcttccacctgttctgtgtgtctttcactttgccaccagtatgtagctttattgctgcatctgtttcttttctggtagaaacaggtcaaacgtaaaatcaataacctgcttctcagcccaaaataaacctacaggtgttgatgtcttttgctttagtccacagttttattctcaagtgcagtgcgtaaaccatttagtgttttacaccgaaaatacgagctcctgagaaccaagaaagtgtaatcttatcttgtgaggcagcgtagttaaaaatacgtataaggccatgcagtatggtttacacctgtaatctcaatactttgggaggccagacaggaggatcgcttgagcccataagtttgagaccagactgggcaacatagcaaaaccttgtctctactgaaaacttaaaaataaaaattagccaggcatggtgtcatacacctgtagtcccagctatttgggaggctgaggtgggaggacttcttgaggccagaagtttgaggttgcagtgagttatgatcatgccaccgcactccagcctgggcgacagagtgagacttaacctcaaacaaaacaaaccatacaggctttagctgagagtcatattgattgggattcagatcctagcttttgcatcttatttagctatataacattggaacagattgctctgagtttccagttcctcgtctgtaaaatgggaatgattatacattggaggttggtgagagaattaaatatgagataatatatagaagatgttaaaacacaataagttgtatgcattattggaaatactgtctgaccaccaccacataccaaaaaaaaaaaaaaaaaaaaaaattagggaaagcaaccaaatatgtaacccgttgtatctgggactaagcatcctttctgtatcattaggacttgggaaacttcttccacaattttagtgggattatattggagtctgaatcttactttagtggccagattcagtgtgtagtaacagttaaggtctaggatgcttctaattgttcatttcataggtggaaaaggaagatggatacttactgcaaagtatacagcaaattttgtctgggagcaagacatacataagagaaagaatttgaaatgactccagctttggttgggcaaattctgacaattatttttaaatgtaagcccaatgaagtcaaatatctatagtgactgttatctccagatgaattttgagaaaaaaaaaatagaattgttataaattaaatgaagcttcagaaagataggactcaatttagtcatattggtggttttttaaaaaattctaaatctttacattgtattttaatgccataaactcattatcactgtataggatgttgtcagttaggcttactaacgctccttttccaccccccaacacacacaaatcatatatctgatttaaatcagaactctgtctcacacatacacacacactctcacactctctctcacacacacatgcacacacccatgctgctggaaatttggggaatcacactgagttgagaatcagaaagtaactgagattcttatctttggaaggaaaggtaagtaagtagctgaggagttcctattcttctgtcagctcatcagccagagatgagatctggtgccactccaaaccctgcctgatgggttaaaccagtattagggttatttattctgttcagtacttactgagtacctgctaagtatttagggagagaaaagaaaagtgtatagacgatgttatctcttctaataaagcatcatttttgcgggggaggggttgctttttattttgtacatgaatacatgaagtggcacaacattcaaaagagattaaaaggataggcagtaaaaagtaagtcttctttccctgtccctagcccacctagttctgctaccttgaggcaactacagttatagtttcaaagtataatttttaatatttttaaaatactttaatactttaaaaatcagaacatttatctaggaatagaataatatagcagtcatagggacacactttgacacatcacataagaaattaggtaaagagccaggtatatcgtggcatgtgccagtaagtcccaactacttgggaaggtgaggcaggaggatcacttgagtccaaaagttcaagtccagcctaggcaacatggtgagaacccatctcaaaaaaaaaaaaaaaaagtgtagcccatgcctgtaatcctagcactttgggaggccgaggccggtggatttcctgagctcagtagttcgggaccagcctgggcaacacagtgaaaccccctgtctctactaaaatacaaaagaaaaaaaaaaaataagccaggcatggcagcatgcacctgtagtcccagctacttgggaggctgaggcaggagaattgcttgaacccaggaggtggaggttgcagtgagccaagatctcaccactgcactccagcctgggcaacagagtcaggctccatctccaaaaaaaaaaaaaaaaaattgtaaaaaaaataggtaaagtaaatcattaatttctaaatcaaataagttcagtcatgacagacaacataaaatttgtatgtggaagtcttggggcttaagagaggataaaagttagattaacattagaagaaggtatggaaaatctgtacacaaaacagtacctatactttagcagggcagccagtgaatcagaaatgtgttaaagggaaagaggtcctctacttagatccaataactgtgtctttagcatctcaacctcctgaaagtaagaagctggggagttgggggtagctagagggagagaccagaccatccatttgcacagaatattcaaaagagtctgtagaactttgagaaaaaccttgcagagtgtacatcttcacctaagactagaatagctaatgcgattgtgaaatggaatatttatttagtgtgtaagatttgtgttgatgggtgggggggggatcctttgtcatttatttaaaagtaatataaaattataaaaatgtttgttactggcccggcagagccaatttggcagtctagaaaaagtctggatttataagcaaactaatggaaataggaaggatttttttagtaatagttttgaggcaactttgtgaggagggaataagttgatttacagacccatctcaaactatctataaacatatatatacatatatacacatgaacatcttaactttatgtaagcctggtcctatttactttcaaatggactggaatgaaaagaaattataccttattgcatttttgtcatgtagtcccaagtaggcagctttgcttcctaagatttctggggtggtttcttcatatttgctttgtatatgggagctcatttttaggaagttttataaccgaaatatcttcaaataaatatatgcaaataataccacaaaacagcataagagccctactaatgatacagtcagcagatgccatataattgtgaactgaaagagatcacttttggctaaattatagagctcagctcattttcaccttttcctaaaaaggtgactctaggtaaaaggtagctgagcagaccacagcaactcttgttcagtttgattattttaaactaggaaaccaggtaactgcagtagatgcctgctattatgagggattagataggagcagtgagccattgctcagctcctgttcagtgtgggggttccccagccagttcatcacaggtatcagagggcaaacactgtgacaggagctgtcaggaggactatacaaagagaaagcattattgacatagcaaagacatgaggtgacctagatgtttgtaagccactctggcagctacagctgagggagcaggcctggttagagatttctcacaggtgttctccagacccgaacactgtagttttatgtagattgctcccctcttgggaaggaagtagagctgttttgtttctattcacgtgttatgtattacctctctcactatctcattaaccagtgttgtcaccaccacacccaactctgtgtactaaaatttgttgttcagaaatttaaaaaaaaaaaacttaagacatgaaacctgagagcccagtttacatttttcttttatttatttatttacttagagaccaagtctctctctgtcacccaagctggagtgcagtggtgcaatcgcagctcactgcaacctctgcctattctcatgcctcagcctcctgagtagctgggattacaggcgagccaacacacctgactaatttttgtatttttggtggagatgggatttcactatgttggccaggctggtctccaactcctggcctcaagtgatctgcccacctcggcctcccaaagtgctcagcttacaggcatgagccaccatgcccagccttatttttattttatatatatatttttagccgggactacaggcacacaccaccatgcctggctaattttttttttttttttgagacagggtcttactctgtcacccaggctggagtgcagtggtatgatcacagctcactacagcctcgacctcccaggctcagccattctccccacctcagccttccaagtagctgggactacaggcacgtaccaccacacgtgactaatttttatattttttgtaggtacgggggttttgccatgttacctaggctgatctcaaactcctaggctcaaacaatcctcccaccttggcctctcaaagtgctgggactacaagtgtgaatcactatgcctggccaacacttggcttattttttaaaaattttagagatagagtctcactgcgttttccaggctgatcttcaactcctggactcaagcagtcctcctgcttcagcctccctaagtagttgggactacaagtgcgagctaccgcacctagttcaatttagatttttctatcattatgccatattacctaagatactgcaagtctggggctggtctgagtgcagtggtgtttacaactagttgatcacaaccaattacagatttctttgttccatctctaatcccattgcttcacttaactaaccttaaaaaataaatacataaaaagatactccaagtctgtacagaatgtgtactgtggctcttcctagacagggcatccagctctgtgccctatttggaaaccagggcttccatctggctccagatgcctgatatgacagagctgaagatagctactataaaatatgttcaacagtaattttattttaaaaccatttctggagactttttactggtctttaaagaaccctttatttccttagacagattaggatattcattaccctatgcatctttgtgatcttttggattgttagaggtaagccttgctggtgataatgtcttctgttttacattagagttttgtccccctcattctagattataaacttcctggaagcgccaggcgcagtggctcacgcctgtaatcctagcactttgggaggtcgaggtgggcggattgcctgagttcaggagtttgagaacagcctgggcaacacggtgaaaccccatctctactaaaaatacaaaaaattagctgggtgtggcggcgtgcgcctgtagtcccagctacttgggaggctgaggcaggagaaatgcttgaacctgggaggcagaggttgcagtgagctgagatcgtgccactgcactccaccctggacgacagagctagactccgtctccaaaaaaaataaataaataaaaaataaacttcctggaagcaatgacatgtttattcaaccccactcccccaacccctaaacaaacacacaagtagaatatagctttgaatagtagctccttgcagattgaatgagaaactactagagtttgcgttatctgttattttaatttcttagtagtgtccaagatatcacactctcctagactgggagccaaagagctataaaaaattggtagcaaagtcaccaacttgctaggaatcataaattaccccttactctgaaaggttgaaggaaatttgagttataaaagacaatatggttactccagcaccatctagaggaaagtctagaaaggtttaaaatggtattttacaagttcactatatcagtttatttatctatttatttagagacagagtctcactctgccgcccaggctggagtgcagtggtgtgatctgggctcactgcaacctctgcctcctgggttcaagcgattctcctgcttcagcctcctgagtagctgggattacagtgcgtcaccatgcccggctaatttttgtatttttagtggagatggtgtttctccatgttgaccaggctagtctcaaactcctgacttcaggtgattcacccgcctcagcttcccaaagtgctgggattacaggcacgagccatcatgccccgccatcagttcaattaaatctagatatcacattcttcctatccttttttattatacatgtcatgatatggtaagatatcgttcacttggccattcaaccaaactttactctcttctttatttattttatatatattttttcttttttatagagatgggagtcttgtaatgttgaccaggctggtcttgacctcctggcctcaagcaatccttccatctcttcctcccaaagtactctgttctcatctactgcctgatagcatgttatttctgcgtgtgtttatctcaactggattgtaaagtgtgtgagaacagattgagatcatgtcttctatttctataatatgtatctccatagccccttactacagataggaagtcattaaagattgattattaagtgataggtataggtattacaaccttataggctagatacaatatagcaatatggaagattcttaaaagcatagcgccaagtgggccgggcacggtggctcacgcctgtaatcccagcactttgggaggccgaggcaggtggatcacgaggtcaggagatcgagaccatcctggctaacacggtgaaaccctgtctctactaaaaatacaaacaattagctgagcgtggtgatgggcgcctgtaatcccagctactcgggaggttgaggcaggagaatggcatgaacccgggaggcagagcttgcagtgaaccgagattatgccactgtggtccagcctgggtgacagaacgagactccatctcaaaaaaaaaaaaagtatagcaccaagttgaggggaaaaaaaacagaatagaaaaaaaaaaattatagcaccaagttgaggggaaaaaaaacagaatagtccaggcatggtggctcacgcctgttggatcactgaggtcgggagttcgagaccagcctgaccagcatggagaaaccccgtgtctgctaaaaatacaaaattagccggcatggtggcacatgcctgtaatcccagctactcgggaggcaggagaatcgcttgaacctgggaggcggaggttgtggtgagccaagatcgtgccattgcactccagccaggacaacaagagcaaaactccatcccccgcaaaaaatcagaatgatatctataacataatactaaataagcaaaataaaatatatgaaaacaaaacaataatatatataatatacatttataagaacatatacaggctgggcatggtggctcacgcctgtaatcccagcactttgggaggccaaggcgggtggatcacctaaggtcaggagttggagaccagcctggccaacatggtgaaacctcatctctactaaaaatacaaaaaaaattagctgggcatggtggcaggtgcctgtaatcccagctacatgggaggctaaggcaggagaattgtttgaacccaggggacggggttgcagtgagctgagatcacgccgttgcactccagcctgggcaacgagagaaactctgtctcaagaaaagtaaataaaaagaacatatacaaacaaaaatgtgtacattaaacataaagaatgtctgtagggggcaggggcatggaaattgtgtaaaatggaataagtaattaactaacaaggggaagctgaaaacaacaactttaccagatttagaaaacagcatggataagtagcagcttttggcgaaggatgaattaagcaactcagcactcagtcaaaagtttttaccttattttcttttttttccttttttgagactgagtctcactctgtcacccaggctggagtgcaatggcgcgatcttggcccactgcaacctccgcctcccgtgttcaggcaattctcttgcctcagtctcccaagtagctgggattacaagcacccaccatcacacccagccaatttttgtatttttagtagatatggggttttaccatgttgcccaggctggtctcgaactcctgacctcaagtgatcagcctgcctcagccttccaatgtgcgggattacaggcgtgagccaccatgcctagctatcttattttctataacttattttaatatattagcccaccaatcagtaacaattaacaaatatttatttagcatcaagtattagatcagctttttccatatctccttcctactctctgacacatgcctcagttcttcacttgtggtttggtctcactcttcttcatgtgtgtcatgcttatcccaaatccatttaggattataaaattctccctattctttctctgacctaacagtccatggctttaccacagtttgtagtgcagcatatggttttgggtttttaagtaatgggttttctccttttttctttctttctccttccttcttttcttcctcccttcctcccttccttcctcttttcttttcttttttcctccgtccctcctccctctctccctctttctcctcccctcccctctctcccttcctcccttcctctttctttagatccagcatcccaactaatggttttgaatatatccattctccgacaccaccctgccccccacctccaagattagaacacaactttccattcagtagccatatctctattctgttttgaatcttcagtagcacttggcacaatgacggagtatggtaagtagtatgggccaggcacagtggctcacgcctgtaatcccagcactttgggaggctgaggcagacagatcacttaaggccaggagctcaagaccagcctggccaacatggcgaaacccgtctctactaaaaatacaaaaaattagccgggcatggtgatgcgtgcctgtagtcccagctacttgggaggctgagccaggagaatcacttgaacccaggaggtgaagggttgcagtgagccaagatcgcaccactgcactgcagcctgagtgacagagcaagactgtgtctcaaaaaaaaaaaaaaattataaaaaataataggtattatgtatttgctgattagttgcataaaagcagtgtttgaggccgtgcatggtggctcacacctgtaatcccagcactttgggaggccagggcagatggatcatgaggtcaagagattgagaccatcctagccaacatggtgaaaccccgtctctactgaaaatacaaaaattagctgggcatggtggtgcgtgcatgtagtcccagctactcgggaggctgaggcaggagaatcacttgaaccccgtagacggaggttgcagtgagctgagatcgcgctactgcaccccagcctggcgacagagggagactccgtctcaaaaaaaaacagcagcgtttgaggtagattaatctgacaatagtttaccgcctggattgacagagataaagggtggagttagggagcacaattcaaagactattgggatagtctacaggtaagttaatgaggacttagactctagtggttgtggggatgtggagaggaagacattattcagagatttcaaaggcagaatgggcaggtcatggtggctgactcttgtccaaatgccagaaagtcaactctatttacttcttttttttttagcccttgatccctcctggctatgcccaaagtttcctgcttcctttacagatcatcagttgcctctcctcaggatccagaattctcacaactttcaagaattcaaactgggcaagcaaatccctgaaaggcaaaastgactgcactggtagaagtggcttgatccccagctttctgtctcccagcatgaagatagcagcagcttagttaacttctctataaagaggcagaaggaaaacaatgcttggcttttatgccttatgtgtagcagttcttatactttttggtctcaggaccccttttcatttaccttaaaaattactattttttttttttgagacggagtcttgctctgtttcccaggctggagtgcaatggcacgatctcggctcaccgcaacctccgcctcccaggttcaagcaattctcctgtctcagcctcccgagtagctgggattacaggcatgcaccaccacgcccagctaattttgtatttttaatagatatggggtttccccatgttgatcagattggtctcgaactcctgatcttaggtgatccaccctcctcagcctcccaaagtgctgggattacaggtgtgagccaccgcgtccagcctaacttaaaaattattgaagggccacataccatggctcacacttataatcccagcactttgaaagatatacacacacacacacacacattatatataatatacatattatgtataatatatgttgaggtagattaatctgacaatagcgtatatgttgggtgtggtggtgcacacctgtggtcctagctacttagaaaactgagagaggaggatcacttgagctttggaggttgaggcttcagtgagccgtaatcataccactacactccagcctggatgacaaagatcctgtctcaaaaaaaaaaaaggtattgaggacctcaaagaacttttgtttttatagattatatctattgatatctaccatttaggaattaaaatttagaaactcaaagtgtgtattattcataataatgaacctgttacatggtaatataaatagtatttttaatggaaaataactattttcatatttttagtagagacggggtttcaccatgttggccaggctagtgtccaactggcctcaagtgatctgctcacctcagcctcccaaagttgtgctttttcgtttctctctctaggagagccttaaagatctatgtttcatttgtagccatttctgggaattcttggcacctgaactgagatcctcattacccattgttgttagaaataacatgttcaaaagaggtataaaacgcgtttttagttttttaaaagttttttattggacatttaccacacacactcacacactgcattcaaaactcgctggcaaactgtggtcgtagggagttaccaaaaatagtttctcagactgattcctttggttagtagctatagaatttttccccatggactttgagttccaaataacagacccttaagagaatcatgtaattagtggatgatagagctacgttaatatttactccctgatttcctagcctaaagtagattggaagaaggaagttggatgtaatagagaggttggtgataagggaaagactactgcagaaggcagacatattaatgacgagaaaaagtaactgctgacagccaaagaggagaccgagaagcaaaacacagaaactcagcagagtagtttggtctcaattaaagagggccattaacccctaatatctcaggaaccttcaaagggacatctctttaccacaccacagaataattgtatctagaataatgaccctgagtcatcaagaaaattttaaaatacgctctgtatatgggaagtccccaacttacgaatggtttgtggtccaaagttaattttcaaaacatttttttggaacgcaaaatatttttctttctttctttttttttttttttttgatactgagtcttgctttgttgcccaggctggagtgcagtggcatgatcttggctcactgcaacctctgcctcctgggctcaagcgattctcctgcctcagcctcccgagtagctgggattacaagtgcacgccaccatgctcagctaatttttgtatttttagtagagatggggtttcgccatgttggccaggctggtcttgaactcctgacctcaggtgatctgcccacctcagcctcccaaaatgctgggattactggcatgagctgccacacctggcctcaaaacattttctatagaaataatgaaataattattttgggccttagacaagctgcttttttcattttatcagtccaataaacaacctttgaatgcctaatattaataaaagtatttcttttttatctggctctcatttatatctttgtttcagtgagagttcattctgaggccagagcctgaacataaatacagttcccctctggcctcataatctgttcctcaaggtgcagacggtctatgtcagggattattagcaagttaggattcggttaccaaatccagtcccacttctggtttttataatacagttttattgaaacacaactatgcctatttgtttacatattgtctggggctctttttctactataagagttgagamgttatgacggagactgtgtggcctgcaaagctttaaatatttactatctgtcccttactttaaaagcctgccaatccccagtctgtgtgatctggtccaccgttgtcactaatatgctgtctctctgacctcatgtgttctcactcttcccctcatttattccactacagccacactatcctctttgctcttccgaacgtgccatgtgcatttccaccacagggcctttgtacttgctttttccgctgcctaaaatgtcttctaatttccacagagctcgctgtctcacctcttacaggtttctctgcttgaatgtcatcttcttgagaaggctttttaaaattgccctttataaaatagcagcatcaccatccctcacatcgtcttctgctttgtttttctccatagcttatcactctctgggtttttgttgtttgtttgtttgtttgtttgttgagaccgggtttcactcccgtcacccaggctggagtgcagtggcgtgatgtggactcactgctgcaacatccacctcctgggctcaagtgattctcctgcctcagtctcccaagtagctgggactacaggcgtgtgccaccatgtctggctaattttggtattttttgtagagacagggtttcaccatgttggccaggctggtctcgaactcctgggctcaagcagtcctcccgccttggcctcccaaagtgctgggattacaggtgtgagccaccacgactggccgcgtatcactatctgacatatgcttacatgttcccttatttattgtctttctcctcttatctgaatgtaagagcagagacttggtcagttttgtgtgttgccatgtcccagtacttgagaacagtgtctggcccagagtaggtgctcatttgtggaataatagaatgaatgaaagcatgtatgtgtgctaatctgtactttaccctggttagttagggtgtatttgtatccagttagggtatagttgtcaacatcaatcaggattgaaaattgggattaaaataagatttaaaagcagcatataggcaaatgctgatgtttccatttggaaactcaatgctactggaatattcaggtacacttcatctcttcccctttctcttttgttgtctcttatgctgagggcaagcatctggccttatttatccttattctctagtacttagtccagcacattccataaagttggctcttaataaacatttgctgccaacccaggagtggacctcagcatttcttcactgtttttgtaacttcaatacttcacagaatgcttggcaaataatagatgctcaataaatattcgttcaaggtaggaatgaattatttgtctacctagggtagacattattccaggttatctgttatgtaacaaattaacctaaaacatagttgtctaaaacaataaatattatctcacagagtttctgtggctcaggaattcaggagtagcttaactgggtggtctgactcagggtctctcatgaggttgtagtcagttgttgactggggctgccatcatctgaaagcatatctggggctggaggatcctcttccaagttgcttcactacatgactattggcagagggcttcagttgctggcctcgtggacttctccatagggctgcttaagtgttctcacaaaatggctgctgtcatccctaagggaagaaatcccagagagaaagcaaggaggaacccccaataataccttttatcaccttgtctcaaaagtcatgcaccatcacttctgcaagttgctaaaggcagctcacactccaggggatgagaattaggccccatcttttttttttcctctgtgaattaggctggagtgcaggggcaacatctcaactcattacagcctagatctcccgggctcaagtgatccccccatgtcagcctccatagtagttggcactacaggcacatgccaacaagcccagataatttaaagaattttttagagacagggtctcactacattgcccaggctagtttcgaattcstatgctcaagcaatcctcccaccttggcctcccaaaatgctgagattacaggcatgagccaccatgcttggccatgaagcatttttaaaacattgagatatttctactaaaactaataattttttttttcttgagacagggtctctttctgttgcccagacgggagtgcagtggcgcgatctcggatcaccacaacctctgcctcccaggctcacgcgattctcttgcctcagcctcctcaggagctgggattacaggcacgcgccactactgcccggctaatttttgtatttttagtaaagatggggtttcaccatgttgaccaggctggtcttgaactccggacctaagatgatccacctgcctcggcctcccaaattgctgagattacaggcatgagccaccgtgcttggctaactaataactatttttatgtgtttttttgggaataggtgatacatacagatgtatgtatcacctatacctgtatgtatgagttcaaaagctaaaaggttttatacagagaaatgataggatatgagaggttttatttaacaggatctctctggtctctgtgttgagaacaggtcagaaagtgataaagatggaagcaagttaggaagctattgcaataatttaaggagtgcttggagcagtagaagtggaggtaatgagaaatgatcaaaatctggatatattttgaaggttgagccaaaaagatttrctgatggtcaggtgtggggacatggatagtaggagaggaaccaagtaaaactctaagggttttgacctgaacacctagaaggatgtacacatgccattacctcagatagggagaattcagagcaagttgtttttgttgttcttggaggagagggttgttaaggagaggatgggtatcaggagctcagtttggaacatattaagtttgagatctccatttagacgtccaatggaaatgtcaagtttgtgattagatacatgaatctggagtttaggggagaggttggggctagggatagaagtttgagtcatcagctacacatgaagtaccagcaaaagatgctgaggaatgaccagagagataggaggaaaaccaggagagtatggtgttctggaagccaagtgaaggaagcgtttcaagaagggaattggtctgagcatgaaggagctgagcatgaaggtaccagatccctgagagaaagtatgtactaatggaaatagtaaaaatgaggggcctagaaaaaaatctctctctctctttctactattatacttggatcagccttgactacacaaatgttttgaggttttgaattattatctgaaacaaagcagtgctgctttgggattgagtttgtctcagcatttcactcctaagaactgtgggaacctggccagtcgtggtggctcatgcctgtaatcccagcactttgggagcccgaggcaggtggatcacctgaggcaggacttcgagaccagcctgaccaacatggtgaaacagtatctctactaataatacaaaaattaacgaggtgtggtggtgcacacctgtaatcccagctgcttgggaggctgaggcaggagtattgcttgagcctgggaggcagaggctggagtgagccgagattgcrccactgcactccagcctgggtgacacagtgagtctctgtctcaaaaataataataataataactaggggaacctgactagtgcctcatacatgtcatcattttccctttactctgctccaatatttatcaccttgaagaagggagaatagtgagtactctaaaacttaataatgggtacttagattatgtccataagacttggtaaatctgaaagtaagattctagagaaacacggagcactatttattactgctgttttttagcagtattatcctcaaacatgctgagcctttccttattttgtgaacacttatgaaaaatagtaagttttccaagatgaagaccagtttttctttctcttcagcctacttgcttctctaaagctagcccctaatagagaaacttggtctgttaagtgttatttgctgcttttctttcctgtcgtcctattctccagctgtctcaactcggaaccttgcaggaagactattaaacctcatcaatgtgtgtttcctttgacatttaaacaagcctccattttgtctttccatatcataattttttctcttcccttctcccatttccagcaccttgtttgacctgtcttctcttcagctcattcattattgctaaagtttgcagattataccaaaggaagaagcctgatttataaacatgtgttcccacccagctgtttcaagaatagtaatgacattcatcttctagttgtgtgcctgctctctgtgtacagctgtgctcatctgcccttataaatgagatgcctatctctaagtcttaccttctctataaatggactctgttcctattaaattgattatgcagtaatcagagcaggccaccttttgggggagacatccatttgaaatcactttgctaatagctagagagaatttagcctaattacttctttaggagagatgccatttcccttaagatgccagggcactgcaaagggataggattcctatccttttcccctctggatgaccccctgcaatcctgtatgtgtatgtgtcttttatctaaggtgaaggtaacaggatattctaagaaaattgtgtgaaaacaatcagaatccattagagatagctgtgtcaggccttagagtctgaaagatctgaccactaatagtgaacccttgagtaaatgatttatcctttctggtgtatcatttcctcctytgcaaagtagccttaacaatccttatatgacaggatttttggcacccacttatggcctgccttcctcaaaaagtgatttaagaccaggtgccgtggctcatgcctgtaatcccagctctttaggaaaccaaggcaggaggatcacttgagaccaggagttgaaaccagcctgggtaacatagtgagactctgtctctatttttaaacaaacagaaaaaattataaaaagtaaacaaatgggccgggcccggtggcgcatgcctgtaatcccagcactttggaaggccgaggcaggcagatcacctgaggtcaggagtttgagaccagcctcaacatggagaaaccccatatctactaaaaatataaaattagctgggcgtggtggtacatgcctgtaatcccagctactcgggaggctgaggcaggagaattgcttgaacctgggaggcggaggttgcgatgacccaagatcacgccattgcactccagtctaggcaacaagagcaaaactccatctcaaaaataaaaattaaaattaaaaattaaattaaaaaataaataaacaaatgccagctactcaggaggctgaggcaggagaatcgcttgaacccaggaggcggaggttgcagtgagtagggattgcgccactgcactccaccctgggcaacagagcaagacttcgtctcaaaaaaaaaaaaaaaacacacacacacaaataaaaataaaagtgattggcctagtgactactgtaatctcagcactttgggagaccaagttgggtggatcgcttggggccaggagttcaaaaccagcctggccaacatggtataaccctgtctttactaaaaacacaaaaatcagccatgcatggtggcacacgcctgtaatcccagctacttgggaggctgaggcacaagaattgcttgaacctgggaggcggaggttgcagtgagccaagattgcactactgcactctagcttggacaacagagcgagactctgtccaaaataaaaataattaaataaaaataaaagtgattaaggctgtannnnnnnnnnnnnnnnnnnnnnnnnnnnnnnnnnnnnnnnnnnnnnnnnnnnnnnnnnnnnnnnnnnnnnnnnnnnnnnnnnnnnnnnnnnnnnnnnnnnnnnnnnnnnnnnnnnnnnnnnnnnnnnnnnnnnnnnnnnnnnnnnnnnnnnnnnnnnnnnnnnnnnnnnnnnnnnnnnnnnnnnnnnnnnnnnnnnnnnnnnnnnnnnnnnnnnnnnnnnnnnnnnnnnnnnnnnnnnnnnnnnnnnnnnnnnnnnnnnnnnnnnnnnnnnnnnnnnnnnnnnnnnnnnnnnnnnnnnnnnnnnnnnnnnnnnnnnnnnnnnnnnnnnnnnnnnnnnnnnnnnnnntggtaaaccctgtctctactaaaaaatacaacaaaaattagccgggtgtggtgatgtgcgcctctagtcccagctactcggggggctgaggcaggagaatggcgtgaacccgggagacggagcttatagtgagccgagattcgtgccactgcacttcagcctgggcgacagagcgagactctgtctcaaaaaaacaaaacaaacaaaaaaaccctgagatttgtagaagccaagtgacttgttcaaggttacactataacaaagccaggatttgcactgaggttttctaactccatgtccagtgatttttagacaacattgtatgtcgaagaataaatgaatataagtgagttactagagatatgtcctagaagtgccaaatcaaaaagtattttattagtgggtggccgtagacaaacaaaagctaattccagatcccccagatttattgtcttgatatattccatagaaaatatgccttggagctgggtgtggtggctaacacctgtaatcccaacactttgggagtctgaggtgggcagatcacctgaggtcgggagttcgagaccggcctgaccaacatggtgaaaccctgtctctgcttaaaaaaaatacaaaattagcccgggcatggtggcacctgccgtaatcccagctactcaggaggctgaggcaggagaatcacttgaacccaggaggtggaggttgcaatgagctgagatcaggccattgcacttcagcctgggcaacaagagtgaaactctgtctcaaaaaaaaaaagaaaaagaaaaagaaacacagatgcaagtcactaagtggggctgaatctgtggactggctgacctccagatctgggaacaaagagtagtcgtgagaggtgatttcagaggagtaaatagatactaaaaaagctcatagactaagaatgtgaggccaggagagtgagatgctaacccccaaccagccttatgaaaggaggcttaaaataagttaattgttgagtggaggagggaagctttaaggagttgggaaggactgtgtcaagctgcctcctgattcattattagaatagaagtgtgatatcctaaatttcactgtggcataggccatttgaagacctgttgtactgagtccctagggggccagaagaaagaaattgcaaagtgatgagacagagaaaggggaaaaagtaataacaaagacattccactcaatatgaggctgcaaaccaaaatgttaataatagaaatctaatgttaagaaagataaccaataaaaaccaggacttccacttcagagaagatggagtagacagatttttccctattcctcccctaaatacaactaaaaactctggaaattatttataaaacaaatacaacaagactgtgaaacgtggaagaaagaaggcagaccagccatgggtcacaagaccttagaaacaacatggtgatgagttccctgggttttctttttgtctctaatatcccagacatggcgctaaaactgaatattatatttaatggtaaaagactgaatggagccaagtgtggtggctcacacctataatcccagcactttggaaagccaaggcagatggattgcttgatctcaggagttcaagaccagcctgggcaaaatggtcttgacaagaggatagcttgagcccgagtttgagcccaatctgggcaacataacaagacattgtctctaaaagaattaaaatgccagccaggtgcggtggctcatgcctgtaatcccagcactttgggaggttgaggcaggcggatcacatgaggtcgggagattgagaccagcctgaccaacatggagaaactctgtctctactaaaaatacaaaattagctgggggtggtggtgcatgcctataatcctagctacttgggaggctgaggcggagaattgcttgaacccaggaggcggaggttgcagtgagcggagatcacaccattgcactccagcctgggcaacaagagcgaaactccgtctcaaaaaaaaaaaaaaaaaaaaaaaaaggaattaaaatgccaaaaaaaaaccctatataaaacataatttttcttttatcagattggcaaagaacaaaatgagaacatcatgttgccaaaggaaaagggcaagaggtattcatgggctactataaatgggtatatgaatgagtatgtcctctttgaggcaatttggaggtggtttggccgtatttgtgagaactccaaatacaagtgcactgtgattaacagttttacttacaggaattcatcttacagacatatttgtgtaggtaaaatgaagcatttgtacaagattattcattgcagtttatttgtaatagcagaagattgaaacaacctaaatgtccgttcaaatgctgccattgaaaagaatgaagtagttctctgtctacacatatggaatgatccaaaatatttgggtacatgaaaaaagcagtgtgcagaacattgtgtgtatattgctatcatttaaggaagaatatatgaacatatttgcatatatacatataaaatatctgtggaagacttttggatgtttccaagtaggggaactggaagactgaagaacagttatggaagggacacttcattttatattagggtttgttggagattttttttggttgaggtgtggggactaccttttgaattttggagtaaggctacattacctagtcaaaagctttatttttttattttttatttttttttgagacggagtctcactctgtcacccatgctggagtgcagtggcgcaatcttggctcactgcaaactccacctcctgggttcaagtgattctcctgcctcactctcctgagtagctgggattacaggcatgcaccactatgcccagctaatttttgtaattttagtagagacaggttttccccatgttggccaggctgatcttgagctcctggctgcaagtgatctgcctgccttagcctcccaaagtactgggatyacaggcgtgagccaccactcccggccaaaaaaaaatttttttaattatccaggtgtggtgacatgctcttgtgatcccagctacttgggagactgaggtgggacgatcgcttgaggctgtactccagcctgggcaacagagcaaaaccccatctccaaaaataaaaataaaatgtgtcttgacaaaaccatgaagtctttacaactgttacccatcctaagggacctcagtagcattgtaggcaattcctatggaactattctggcccaatcctatttgtcccattggtacccagagtacctcctaaaccctcttatagaagtcagagtgctgatcaaaagaatactattctcagtggcaaatggggtgtgtcttgtctatatctatgtgctcttattttccagggatgttggtggtaaatgtaacgtggaggaacaagacatatgtaggtacactccttgactgcacacgacatgattgggcacccccmaggtaagcacttacagctatttagtttatattattctgaaccacactaattggtgatcccttatacttttatcctgctagagttgtacatccagcttttaaaggacatgatggtatagataccagggaaagcactgtatttatctgacattcaagaagactgaatggccaggcgcggtggctcacgcctgtaatcccagcactttgggaggctgaggcaggcggatcacctgaggtcaggagttccagactagcctgaccaacatggagaaaccccgtctctactaaaaataaaaaattagccaggcatggtggtgcatgcctgtaatcccagctgcttgagagggtgaggcaggagaatcgcttgaacccaggaggcagaggttgtggtgagccaagatcacaccattgcactccagcctgggcaacaaaaagcgaaactccatctcaaaaaaaaaaaaaaaaagaagatgaattgtgtattaaagtgttcggggggccgggtacggtggctcacgcctgtaatcctagcactttgggaggccaaggcgggtggatcatgaggtcaggagatcgagaccatcctggctaacacagtgaaaccccatctctactaaaaatacaaaaaaattagccgggcgtggtggcgagcgtttgtagtcccagctactcgggaggctgaggcaggagaatggcatgaacccgggaggcggagcttgcagggagccgagatcgcgccactgcactccagcctgggggacagagcaagactccgtctcaaaaaaaaaaaaaaaaaaaaaaattaattaaaaaaaaataaagtgttcagcgggtgctcacttcagtggtacatatactaaaattggaccaatacagagaagattagcatggcccctgcacaagggtgacatgcagattcgttaagtgttttatatttttaaaattaggaaaaaaaagtgaagtgttgaggggatgcactttgactggaattattaaagtcaccttgagaccaaagctataacatctaaccatgggtgagcaaacattcattgatgatagctatttctcagaaatttgaactcaagaacatttttagttttataaactctactagaacatacgggtttcacaaggaccttttcatgtcgcaatttgacctttagatggatatttcaatcaatggccccttatagctttttcctaatattagtactcagttcgtcagggtttgggaaatccaggcgttgagggtaacttgcaactaacatacaggtaacatcctaggagcttaccaattaatgcaattcccatgcagtcacaagtttctttgttggatcatattcattgaaaatggtagttattatctgaacagttcttttaggaaaagtatcttaaaccttcatctgcccattgttcccatgaaacaaagatgggcagaaatgtcccaaggaaaggtattttaaagttcttgattccataccactttcttattctcagatgtgattattctctaccgagggctatttatgcctcttaattttcagagatgctgggccaggtttctagaggcttagacttttttttttttttttttttttttgagatggagtctcgctctgtcgcccaggctggagtgcagtggcgcagtcttggctcactgcaagctccacctcccgggttcacgccattctcctgcctcagcctcccgagtagctgggactacaggcgcccgccaccacgcccggctaattttttgtatttttagtacagacggggtttcaccgttttagccaggatggtctcgatctcctgacctcgtgatcctcccgcctcggcctcccaaagagctgggattacaggcatgagccaccgcacccagcccaaggcttagacttttataagactatattcaggctgggtgcggtggctaacgcctgtaatcccagcactttgggaggctgaggcgggtggatcacctgaggtcaggagttcgagaccagcctggtcaacatggtgaaaccctgtctctactaaaaatacaaaaattagctgggcatggtggctcatgcctgtaaccccagctactcgggagcctgaggcaggagaaccgcttgaaccagggagttggaggttgcagtgagctgagatcgctccactgcactccagcctgggcgacagagcaacactccatctcaaaaaaaaaaaaagactatattcagaccataatagttgccctgataagaatcagaagcaggccaggtgcagtggctcacgcctgtaatctcagcactttgggaggccgaggcgggtggatcacaaggtcgggagatcgagaccatcctggccaacacggtgaaaccccgtctctactaaaaatacaaaaattagctgggcgtggtggctcatgcctgtaaccccagctactcgggagcctgaggcaggagaaccacttgaactagggagttggaggttacagtgagccgagatcgtgccactgcgctccagcctggcgacagagcaagactccatctcaaaaaaaaaaaaaaaaagaatcagaagcatatgagctaaaacaagttagtaaagttctttatgccctccctttgcatttctgagaaacctattggaaggacttatttctgctttgggcatgcaagaatccagagagataggagctgagtgagtaggttgataacaaggaagcagtaagtagctttacagtagaactgttctgggaacccaaaggagatatttgacaaaatttgcctcttttctgcaatagctatggttcccactgtcttagaaacaacctactccagctgccccctggaacaagagagtcaaaaccatctttagatttacaagggaaccaatcttagctaaaggtttaattctaggcagtgttttaagctccatgaaaagctactttagggcctatgaggagtgacccctaggtgcagatctccagacattcaaagaactcatgtactcttggttatatctgatgtttagggaactcttaaatggataggtgctttgttctacctttctatatcttcatagtgaggtatgtaagaaaaaggcattgggctaaaagtagagctagagtcttgttgtatgttgccattaatcagtgatgttaccttggacaagtcatttagcatgcctggcctcaatttcctgtaggatctctaacatcttttctgaaaccatgactatggctgtatataggaaatgttgacttgactatcttacggaacagattctgcatggttttagaggtaaatgtttgggaataatttgcagctaacgtgtatcccaggagttcaccatttagtgcaattcacaatcagaatttcttttaacaaatcatattcattgaaaatgatagtcaccatctggacagttctggaggctacagctaaactgctttgaagatgttttctcttcttaataatattctgttgtgtttatcctttgccaaggttctgtgactccccgaccagtgacctggaaatgcgcaatggccggggtagaggcaaacgcatgcgtcccaacagtaatacacctgtcaatgagacagccacagcctctgacagcaaagggaccagtaacagcagcaaaacccgggcaggagccaatagcaaaggccgtcggggcagccagaattcttcagagcaccgcccacctgccagcagcacttctgaggatgtcaaggccagcccttcctcagctaataagcggaaaaacaaacccctttcagacatggagctgaattctagctcagaggactccaaagggagcaagcgtgtccgtactaattccatgggctcagccactggcccccttcctgggacaaaggtagaacccactgttctggacagaaactgcccctcccccgtcctaattgactgtccccacccaaactgcaacaagaagtacaagcacatcaatggacttaagtaccaccaagctcatgcccatacagatgatgacagcaagccggaagcggatggggacagtgagtacggagaggaacctattctccatgcagatcttgggagctgcaacggtgcatctgtctcacaaaaaggttccttgtcccctgcccgctcagctacccccaaagttcgacttgtagagccccatagcccttctccttcaagcaaattcagcacaaaaggcctctgtaagaaaaagttgagtggggaaggggacacagaccttggggccttatccaatgatggctctgatgatggaccctcagtgatggatgaaacaagcaatgatgcctttgattctttagaaaggaagtgtatggaaaaagaaaaatgtaaaaaaccctctagtttaaaacctgaaaagattccttccaagagcctaaagtcagcccgtcccattgcccctgccatccccccacagcaaatctacaccttccagacagccaccttcacagcagcgagcccaggctcttcctcaggcttgaccgccacagtggcacaagccatgcccaacagtccccaactcaagcccattcagcccaagcccactgttatgggagaacctttcacagtcaaccctgccttgactccagccaaggacaagaaaaagaaagacaaaaaaaagaaggaatcttcaaaggaacttgaaagtcctctgacccctgggaaggtgtgtcgagcagaggaaggcaaaagcccattcagggaatcttcaggagatgggatgaaaatggaggggctcctaaatggctcatcagacccccaccaaagccgactggctagcatcaaggctgaagccgacaagatctacagtttcacggacaatgcccccagcccttccattggaggcagtagccgccttgaaaacactacccctactcagcccctgactcccttacatgtggtgacccagaatggagctgaagccagctcagtcaaaaccaacagccctgcatactctgacatctctgatgctggggaggatggggagggcaaggtagacagtgtcaaatcaaaggacgccgaacagttggttaaagaaggggctaagaaaactctttttccccctcagcctcagagcaaagactcaccatattaccaaggctttgagagttactattctccaagttatgcacagtccagccctggggctctgaaccccagcagccaggcaggagtggagagccaggccctgaagacaaaaagggatgaggaacctgagagcatagaagggaaagtgaagaacgatatctgtgaagaaaagaagcccgagctgagcagttccagtcagcagccctcggtcatccagcagcgtcccaatatgtacatgcagtccctgtactacaaccagtatgcctatgtacccccctatggctacagcgaccagagttaccacacccaccttctgagcactaacacggcttaccggcagcagtacgaagaacagcagaaacgccagagcttagagcagcagcagcggggagtggacaagaaggcagagatgggcctgaaggagcgggaggcagcactcaaggaagagtggaagcaaaagccrtcaattccaccaactctcaccaaggcccccagcctgacagacctggtgaaatcaggacctggcaaggccaaggagccaggggctgacccagccaaatcagtcatcattcccaagttagatgactcttcaaaactcccgggccaggcccctgaaggccttaaagtgaagctgagtgatgccagccacctaagcaaggaggcctctgaggccaagacaggtgctgagtgtggtcgacaggcagagatggatccaatactctggtaccgacaggtaactgttgccctgggaggaagtggaaataccgtatggtaatcgtctatcttcctcacaaataagggctgtccttatacaggggttcaacggaattgagattagcaggagagatgtataattttaaggattctttacctttgtaaactattttaatgttttttattttattttagtattattattttttttgagatggagtctcactctgttgcccaggctagagtgcagtggtgcaatcttggctcactacaacctccgcctcccaggttcaagcaattctcctgcctcagcctcccgagtagctgagattacaggcacacgccaccatgcccagctaattttttttgtatttttagtagagatggggcttcaccatcttggtcaggctggtctggaactcctgacctcaagtaatccacctgcctcagcctcccagagtgctgggattacaggcatgagccactgcacccagccaatttttattttattttatttatttatttatttattttgagatggagtctggcactgtcacccaggctggaatgcactggcgcaatctcagctcactgcaacctctgcctcccaggttcacacgattctcctgcctcagcctcccgagtagctgggattacaggtgcacgccaccacacctggctaattttttgtatttttagtagagacggggtttcaccatgttagccaggatggtcttgatctcctgaccttgtgatccacccacctcggcctcccaaagtacctggattaaggcgtgagccactgcgcccagtcgtaattttttttatttttatgtttttatagagaccagagtccctctgtgttgcccaggctggaatgcaatgatgcagtcatagctcactgcaatttccaactcctaggctcaagcagtcctcctgcctcagcctcccaattaaccaggactacagatgcatgccaccacacccagatgatgttttaattttttgtagagaggggtctcactatgttgcccaggctggtcttgaactcctggcctcaagcaatcctcgcgcctcagcctcccaaagcacagggattcatattaatgttttttaaaaagcacttttatatccatagcaggtgttttttccatttgacaggaaaggcccagacaagttagcttaatttgtctggggttacttgagacctcactagcagagccaggattagaacccaggtatctcgattccttgtccgtgtttcctccactgtttggttcctatgaaatgagttattgatggtctctctattttttagagtaggtccaaagtatactcagttactgagtttctttaacaaggattttataggttgagttagaactaggaacttggaatctcatatcttgctctgctcatgagacttagaatgtcttcccttccctcttggtataatagttatgcttccctccctcctctgatctgagtgtcacttataagctttccagtccctgagcgtgctctgaaaaagtgaaacaatctaaacatattggaaggggcagcctctcctatttcagtcgttttcccagaatgcttgttcttacctagaaaacatccactgatgcatggatggattttccttttctccccctgccccatcttgttccctgtgggtgggtgcagaggtgggggcgggggctttttaaccaaaagggagcagagttggattataaacaagatcagtagaggccaaaatcctactctgccccaggtgtctagtactaattatctgctctggtggttctactgggaccttgggcttgaagtatatctgtcttatctgtacaacacccagtcgttgttctgtgattgttgtaggaggcagagccccggatgtggacatatgtttatcctgccaagtactcagacatcaagtcagaggatgagcggtggaaggaggagcgggaccgcaaattgaaggaggaaaggagtcggagtaaggactctgtccccaaggaagatgggaaggaaagcacaagtagtgactgcaagctgcccacgtcagaggagtctcgccttgggagcaaggagccccggccaagtgtccatgtgcctgtgtcctccccacttacccagcaccagtcctacatcccctacatgcacggctattcctacagtcagtcctacgaccccaaccaccccagctaccggagcatgcctgctgtgatgatgcagaactacccaggtacagcaccaagtgccagcactattccattcactggaagggggaatgaagcacagatttcacatccagagttttcttgctcagccccaaggcatattgaggctcgcttagatgacggaccttttttcactgagtcattctgtgaggtggccaccataacccatagttccttgaatgacccataatgatagtctgtgtgactacctctctctcccttgctcyagctcaaggattgtctctgtagtcagttttcattgctaactaaaggtaaaactccttctctgtcactgctgtctcccctcagctggaatttgtaaaccatatactccacgttttgcagtgtgctaggcactgtgggaggtacaaaagaagtagagccattgagttccttccactcccggagcttacagcttaatcatagtggagagacacaaagaacaaataaaatgcaaaccataacaatgcatggattcagttgccagatcatgttcacctgtcaagtaagaagagccatctgaagtcagactggggggaggtcctgctagattcagcttggaaaagacaagctctttatagtgtttaaatgttttttgtttgtttgttttttgagacggaatttcactcttgttgcacaggctagagtgcagtggcgtgatctcggctcaccacagcctccacctcctgggttcaaacgattctcctgcctcagcttcccaagtagctaggattacaggcatgtgccaccactcctggctaattttgtatttttagtagagacggtgttcttccgtgttggtcaggctggtcttgaactcccgacctcaggtgatccggctgccttggcctcccaaagtgctgagatacaggcatgagccaccgctccggccttaaatgttttttaacttgttagaagaaaatgctcttatttaactctactcgttttgttgcccaaagaaccatgtggggtgcttctggggtggaagggcactgctttagcctcactccttagagcctccagcttcctacagcagcctaaatagtctcaacattctggtgacattattataaagcacactctaaatagaaataagcttttcaaacagaaataggaaatttcttacccttgaggtgttcctttatccctgtcactcacacccatcaatataaaaatcatagttgcatttgttgagtgctcgccctgagccaggcgctgtcctctgagatttatagacattatcttttttaatcctccctatcaccttaagtaataagtattgatatcttcatttttgatgatgaagaaactgaagctcaaaacagttatttatttgctcaaggttaccaagctagtaagtctcagagtaaggttttgagcccaaggctctgactccagataagtgtgatctttccactttatcatatcacttctccaagatgaatctgagaccagttcaaagaacagtatcagatctatggaagttggaagcaggaaacagggccatgttcctaatatcccttagctaatttttcctgtagagctcagtaaagaaaggtcaagccaacagtctcagccaaagacactatgttagaaaatacctcagcctgtgcctaggaaagctgatgcccacccaatcaagctcactaaagcagagtttcctctacctctcccatctctttgactgtttgatttctccttccacaggttcctacctgccttccagctactctttttccccatatggcagcaaggtctcaggtggtgaagatgctgacaaggcacgagccagccccagtgtgacttgtaaatccagctcagagtccaaagccctggacatcttgcagcagcatgccagtcactacaagagcaagtctcccacggtaagaaaagtacagtgatgctggctgttacccaaagactagtaaggccagatccagggtctgggagaaggtgggcaagttcaggtcctgaccacagtgcagcttggctgacttgacactrgcagcccccagggcatcttctttattcttaggtatcttgcacttttaggggtcataaggtggcaccctgggcatctcacttgtgtgtgtgtgtgtgtgtgtgtgtgtggttgtatgcatatgtgtctcactatagtgcttttgtgtctctggtttcctttccagataagtgataaaacttctcaggagagagatcgaggaggctgtggggtggttgggggtggtggcagctgtagcagcgtcgggggagcaagtgggggtgaacggagtgttgaccggccccgcacctctccttcccagcgcctgatgtccacacaccaccaccaccaccacttggggtactcattgctcccagcacagtacaacttaccctatgcagcaggtaagcctgttttccctaccacctgttgttttgtcttgttttgttttgtttatcttcatcccagtagtaatgtccacagctaggaccctcctacctgcctcataagaatccttttttaattttttttttttgagcttctaatctgtgcacagtcctaacctcctgcagtcattaaagcatatgatatttattcctcccttggagtttggggactcttaaattcctccagaatactggccttgatagtcagaagaatatggaacaggtgttccccaaaggcaaagagaaacaatcagctgagaaatagagccttattatctatctccagcaaatatatctggctgagtatcagatttttttttctgtcagcaccccaaaactcagggaaaaagattaatggaaggtttctgtgagtgctacactaacatgttctcctgcttattcagggctttcttctacagccattgttgccagccaacaaggctcaactccctcactctacccaccccccaggaggtgagaatggtaagtcacttttattaatttggggcaacacataaagccgggatagttgctacctggatcacagaatccctaggtgagaaatagctatgaggggtcagcagtctggaatccatggaaccctggccaagcctcttgtacaagagtctcccgtgaagccatgtgcatctgagaggacctgtggaacacagtgtcccctagggaccagtactggccactcctacaattcattttcttggagtgccaccttgtggtttttttaccaacaggctgagtgcctggttatctgtccatgtttcccttgcagacaccaagtgcccggataaagtcagcttcacgggcccggactggcttacccaaggaggtgctgaaggtgccgtttagacatcagttaaatggtgttgatcatcctgtttgccgtttccaccatgactgaaggcagacccttggctatctcacctccaccagacctccggactacctgaccctacctcttcctcaggagctggagagctggtacttagcaaaaatatttattctctcagccacagttatgactattgtggcctctgtggagatgaaggcacgggaagcaaccaggggaacatggcctcagcccagagaagccactgctctgttccccaagcccttggtctgctgctggagcagtaccagcccccccgcccaccagggagggacccccacccccaagcactgggtaaggtctgaagacagcacagcagccatacccctcaccatcattaccaccatcaccagattctgcatctccctagtgctttgcaccctgggaattggcagcatgtggaggaactagaatctcaggaaagaaattgggggttgttttctacataattgtgaaaacaaggtcttcaaatgtggagacttctccccatttacatgagcacatataaacgctcacaacctagcctggaaaggaagaccaaggcatctgccccaacatggccttgagctgcctgtgaggcagggggcaggggttccaacaccagcacagggctccccagggacactgggagcaagctggtgctggagcatgaatgacgtctgtgaagtagaacctgcgtccccactaagtcctgctgcttcttattccccaactccttgcccttttcccttccctcctaaccccttggtgcctttcccagggggatccccacactggtcttgcctcttcttttccactgcttggctcttaagcctcaggcagataaactagtattccccccagcttggggaaccttggagtctgccaggtcaccttagggcaaggcccagaaggcagcccctgggagcacccagcagttcttggagatgtcctgtcatctagccatctgatatcttcctcatttgaggccacagatatatacagcccaattcctctgtctacaagtacatgattttatatagctcagtctataacctccatgtgggccaatataagctgtgtttcttggtaacacatattttgtttgaggggccactggccatgggaggttatttgttccttagaccctggaataacacatccaagccattacttattagagtctcagaatgtactcagtggagctgtgctttgaggcagccaacatttctctgctctccttagaaatgcagtctcccaatggaagctttatactctttgtactgggaaagtgaggatgatttggtagctttattggggtcatgtcttccccaaggtgtggggagcttagcttacttggcttttgaggtatcatccctctgttctcccctcctatctttccatgaccctctggattgagagagagagataaagactgacagacaccagtgtaggctggaaaagggagtgtgtgaccagagtgccaaaagtgactaggagcaggaacttggctccgactcagtttggaaaatgggaaataggggacagtaagcacaatgcccagtagtagttgatttccaaggaccctggaaccctacacttgagaggcttagggtcaccatctgctcaagaggatcccctctgatctacaggccttttccctaggtttctgcctcctcgtttttgttcaagttgggttctgagtcctccccaaaaaccattgttttagacctcttggcagggccccaaaacagcctccctcatacccatcattccgtctgccttctgctgccctcatgggcagtgctctgagcagtgacctccctttcctccgtggaagtagctagtgcagacaccgtcatcccaccccacctgagtcaccccaaccaagagggtgactgaatttcagcctgattatgccctcctggggctcctgtgaggtggagccaaggttccctctctgttcctgtttgtttttaaatattgttgtgtgttttgtatctgtggcactggcctgcagcatactctgtatatattgtaaagaaaccgttaggagtaattttcttttgcattgggcaggcatggccctgcattcctgccctttccactcattctgtaacacagaggacgaacttctgtattagctgggcagccttgggttctccagaagagaacaggtttttcttttcctttttaatttttcttcttaaacatttggctctttgatcctcatatccaagtctcccctgaagagtaggagctgctcagaagagcaggtgaaagccaccatggcagatcctgatgcctgccgggcctagtcttccctctgaaataacatgaagcagcagctgtggagattcttgacaagtgctgagtgaaagatttgctgcccacctctacatggggaggagaaacacaggtgggagctacctgtggcatccatgacctagtcagagggatgagatgctcagcaggggtccccatcctatcccaccccacaaacaaaggctggaaaaatttgctaccaagggccaagaccaccagaccaagcctgtttatgagccacccctgcccaggccctcacagacattgctcacggggcttcccatagaggagaagctaaagagggagggggcctcatccccagatagatcaggcaaggcttggagagctgctctttaggatccacatcaactacttcctcattttaaggtatggcagttcccttcatccccttttcctgccttgtacatgtacatgtatgaaatttccttctcttaccgaactctctccacacatcacaaggtcaaagaaccacacgcttagaagggtaagagggcaccctatgaaatgaaatggtgatttcttgagtctcttttttccacgtttaaggggccatggcaggacttagagttgcgagttaagactgcagagggctagagaattatttcatacaggctttgaggccacccatgtcacttatcccgtataccctctcaccatccccttgtctactctgatgcccccaagatgcaactgggcagctagttggccccataattctgggcctttgttgtttgttttaattacttgggcatcccaggaagctttccagtgatctcctaccatgggcccccctcctgggatcaagcccctccyaggccctgtccccagcccctcctgccccagcccacccgcttgccttggtgctcagccctcccattgggagcaggttggggcgagctggaggcccgggctggaggggcagtgttgctgttcatagattttgttccattggcgttgctctgttgaatttaatttcagtcttcctgattcttcccttctgtaaagtgtacattaccaagttccttgtttttttatatatatatataaatatatatatatacaaactgtactctttttgcctttgtacattcaggcaagaagagaaaataaatctttttaagagacaatcacaaatctgtgagggctgctggttatttctcctggagtttgctgctgagctgcctcttccttcctcccaattttcctgttctccctcagctctcctgatcttcctggccctgctccatatgcatcctcagcttcactttccctggctgatggcaagctgttgaatccagtgtccagactacctgccttgtaacccttttctgcccagcattgttttctggcttggccactggcttagcccaggagctttactctgtgccctggcctcccctctcttcacctttagatttccattcaccgaagtggctttggacccctgggtactctgggacctgtttcctggaggccctggcttgggacactcacctgtgaaactatgcagctgggagctctctgcctaagagtttgcactatttaaacctgcctgggagttaggacggatggttttaggaatgaccggaaaactacccctaaaactcccccgacattccagcctctagaatgctctgatccagagctcagtggatgattcccagctggtggactcctgtggctaccccatcagaacaagggctaagggtttatgggtcaagagtatttgatcagaattttaaagggtggtatactctgaaacacagcccaaccaaaccattgtttggccgctttctcttttcctctaccttcctcatccccacttttttccctttctctctacttcctcttcttaattggctttggaattgaaatatatttttaaattatttgttgtatttattgaataaagtttttaatgtccctgttcttaaatttagacttagtttgcctttcacacaccacccccacccccaaaatattctaccttctaagttgctttttaaactgtagtgcagccttttgggtaccatatttctttcctgtcagtggtcttcaatagcaaaagttttttttgaaaagggaaatcttgactgggtgatttttttttgaagagggaaatcttgactgggtttccaatttagcctttgtgactctagccgtattgaagaggaatcaccaataggtggcagcagaatctcaagcatgtttcttgggaaaaagggactgagttttgtcttggttctttttcatctgtcttgtcgattccttgtgtttgtttaatatctgcatcctaaactgccagctgcctctaggaattacctgcccagtgggggacacttgatttcaacggaatgtctctagtcccagacttgctctaataacatttgccaggcacggtggctcacgcctgtaatcccaacacttggcgaggccgaagcgtgggaatcacttgaggccaggagttcgagaccagcccgggcaacatggcaaaaccctgtctctactgaaaatacaaaaaattagctgagtgtgatggtgggcatctgtaatcccagctactcaggaggctgagacaggataatcacctgaacccaggaggcggaggttgcagtgagctgagattacaccactgcactccagcctgggcgacagagcgagattccatgaaaaaaacaaaaacaaaaaaaaacttgggattcgagctcattacttttaatgaatacaagttagagtccaagataaatgacttggcccacagtgaaaacacaagcaggctccataaagagcaatgtgagagccacagcttaacagtagacagttgcaaaaatgtaggtggaagaacatgcccttcaattggcaaaacagaagcaaaagaaaaaaagtgccagtaaatccttgagaaattaaaaaaactgtggtgaagaggattccagcccccttggtaccactgacagcttattcatcaggctgtggtgtgggggactggaagccacaccttaggacactgagctccaaaaggggaaaactagaacagggaaggtgtgtgctgcatccttcaaagacctcaggaatgggaatgtcaggagctccatgcaaaagccaaaacccagtatcaggacccaacctccccagccttttacagaaaaggaagagctaagagcagattggatcttgggtatagcctctcctagatgaagctgatatgtacacatctctctccagggggctctggcagtaagtctcagactcctagcaaccccgcatttcacagtgtaatatggccccagagagagacctcagccagtttatctgccctcctacactgcagtttttttcccaaggagcacgcaccacacctctatttattaggctctggagtcaaaacagtttggtagggagttggtcctagttcagaaataaagaatagaccaaccacaactttaaatcagtttattgacacagtaacacaacacacttgcctccctgacatccccgtccccctcacccaatctagatctctcccccttgctctccccttagaaaaagctgtttagtgaaaacagttaagggcaggccacttctacactcccagcgctaccctaggccctgcagagcagagtctcagacactactcggaacctggtggggaggcagctagtactatactcagccagccagaagtatccagtccctaagaacggattgccccacaattcccaggccctgagttgctatatattcctcttccttactgctgtttgtgaccccaagaaggagaccttggggcctgggcctgcagccaggagcaagaactcctggcagtgatttgagaattaattagagtttggctagtgttttaaaggcccaggcatcccccaaaaaagccctggtggtgggagtaaatttcaatgcccctatttaaaatgtactgataacattaaacagattaagccagcttaaccaaatgccagaataacactaagctgtaaagaaggaggggtcggacctgcttactccaggccagacgcaaatgcacacagagaagcccaggtaagagtgtcaaaaaacaactcaaggacactgcccagggactgaaaagcctatactcaggagcccctggggtgacaggaagcaaagaaagaaaatacacaagtcttaataaccaaaacagaaagccaacagcagggaaacctgagcctgacagtgctgcccaccagccctccaggccatgcccctgaacccagacagtccctccccctctaggcaatgtcctcccctaggctagatagaacacatcacacagcgcagtttagaaagcttctaatgccagttcataaacatcttcatttactattggtgattacatgtgaataatatgtttatactgttctttatggaaaacaatttcaacgagtcaactccgagaacacaataggcaaccctcaccctgagcccctcagtgtccttccctagacagcgaggagccctctcgtctgtcccagggctgcctaacttcccctcttcccccactgtggctcttgggtaaagcatcctctatgactattagtcctcatcggacaagttctggtccaggggataaaccatgaacatcacatctggccgagaggggacacagggatggcctggacgtacaatctcaaagcccaagaagctgaaggtcttcaggagtggagctgcagaagacagagtgtaaaaaagtctgatgagaaacacaatggtaggctgaaatcaaaaccccaaacaaagatggaacaaataagcactaggcttttacgagcccttcaggcacttgccctcctgccatgatttcccagggtttgaaaggcaaattcaagagtcccacctcatcctggaggtgctcccttctctcccccaggccccactgtctgggctgtaaggctcaggccactctgactcctcacctctgtcttctcggcccttcctgaagcagatgaagacatagttcactttcatcttctcttcagcaaactctagcagtgctaacaatctgcaggaagcaaagagaagtacttaggcccatcaccaccttcctagacctccctcccattcacaccccacccccacccctaccaacccaaaggcttttctgaggcctacaaccagcaatataaatacagaagctctgggctgggcacagtggctcacacctgtaatcccagcactttgggaggccgaggcaggtggatcacgaggtcaggagatcaagaccatcctggctaacacggtgaaaccccatctctactaaaaatacaaaaaactagccgggcgtggtggtgggcgcctgtagtcccagctactcgggaggctgaggcaggagaatggcatgaacctgggagacggagcttgcagtgagccgagatcgcaccactccactccagcctgggcgacagagtgagcctccatctcaaaaaaaaaaaaaattcagaagctccaggaggaagattcctatgtcaagaccccaagagccttgaattctggaaaaaaaaaaaaaaaaagccacagcgcctgagaaaaatgttactaacttttctcttcctgcaataggagatctgaaagtaacactacccatcttaactaatgctgtccacaagacagagtctggggcctagaaagaaaacccagttcttcaggtgtcccacagattgccaagtctgatatgatcacctgccactgagagggacactctgggctctaacactgcctaaaaggattttctcaagaggctgggaccactcaggaactctgtcctcaggacatttcttacccatcttggctgcttggagggtctttgcccaatccaatgaaatcccacttacctctgagcttcctgggtggggtgtgaatgggagggaggtctaggaaggtggtgatgggcctaagtacttctttttgcttcctagccttttaaactacagtactgtgtagctacagggggatttagtgtcagagtgaaccatggggcgattaaccggcaggcatttggttaatgtgataacaatctgctttaattataacctagagcaggcctgtcttactggctaaaaataacctgttacaaaacggtatctgcttggggagtctagagctaagggagaaggcacagactcccctacaattctgttacccacagtaaacatatactcttctctggaatgggacctcctttccctccccagcatttggctctttacccttctttgctcccatcagctaataatccatctgggatttctacaaacaggctctggctggacaggactgcatcccaagaagagaccttcacctcggtgacctcatactggaagtggacgatgtgaggttttccatcattcacagggaggtcctgggtcacagtgagcttctcgtcctgggaaggaaagcagggcagaggaccaggtcactactgcttctggccatatcatccactccctaatctaggcgatgctgggagtccccttaggccagtgtcagggtagcgtgggatagaggccatgctgaaaacgcagagcttcatgatggctaaaaggagctgtcactcaccaggcactaagaccagttgatggtggtaaaagctagcaaaacagaaagggaaatatttacctaaattgtccactaggtgccaagtacaaagtgctgtcccatatattacctttatcatcatgacaagcacttgagatggtaattaacaactccactttaagtctgagaataatgaagcaactgacccaaggctccaaagacagtgaatggcagagatgagattcaaacccaggtctccctgactcgaaagcccacgctttcccccaacaccatgttcttttccttccctgtcagaaagggaaataccaaaaacaaatgagggtatgtatgagggtttggctggagccccagtcagccaaagtctgattccaagtggactgcagggtccgtgttatctcccttgggcacaatctcaaaagcccagaattcagctgccttgctaaccttccatcccagtcttagtgagaagctaaactaacttctgggcctcaattacagcagattaaaaggcaacaaatggtgctgatatctctcctctagtattcccaataagccatgcaacagcctcagctgaaagagtccttcacagtccccccactggcctaggctaagagccagaagactaagaaagtgattattccccttgagcagcagcacagtggagtctgagaaagctccaaccccagccttccatcccagggtcctccttaccttatatattagagctgagagagaaggatccctgccgccccctcgcccaccggggatcttcgacagtgggtgaggggcatcaggagcaccacagaggccctggaacaatgtgcctgcagcactggagctggggacagttactcaaaggcaaaatactactgcaagagacagagagggtgagacagtaaacaccaagacttgacgattttttttttttttgaggcggagtctcgctctgtcgcccaggctggagtgcagtggcacgatctcggctcactgcaacctccacctcccaagctcaagcgattctcctgtctcagcctcccgagcagctgggatttcaggtgcacgccaccatgcccagctaatttttctatttttagtagagatggggtttcaccatgttggccaggctggtctcgaactcccgacctcatgatccacccacctcagcctcccgaagtgctaggactataggcgtgagccactgcgcccggccaagatgtaaagatataactcaaatcccacccccaccccatcctggctctctctaaacaagggaaggcttatgaacgctcccagctgccccagtcctgtgggcttcagcttccagaactacgctgctgtcttaaggggaacccaccgtgttgcaaagtcatggggaggaagtctcaggagggccaagggactccagctgggtttatttgaccggaggagcacctagcaatcttctaacaaatcactgtggcactgggcagaccttggaaatcaccaggtcctggcttacctgccaagcctcaaaccctgtgccagtctcttttcatttccctatggtgcctcaaccacctatgtggcagaatcaaaaaggcccacagttacaggctggagaggggaagtcatatggtctgggtaccctgttcctgaggaactctcaaggctacttccccagtgatggccccatcccccttctgagcaaaggaactggggtgagaaactttttttttttttttttttttttgagacagagtttcac

SEQ ID NO: 97087 - DNA, 32235 bp, Homo sapiens
caggagttcaagaccagcctggccaaaatagtgaaaccccgtctctactgacaatacaaaaattagccaggcgtggtggtgggcacctgtaatcaaagctaatcgggaggctgaggcaggagaattgcttgaacctgggaggtggaggttgcagtgagctgacatcgcgccactgcactccagcctgggtgacagaataagactctgtctcggggtgggggtggggacacaaaattgtgactgaaaccctgtaatgtctcaagtatgatattaagtcttttagatggcaggcctgatttttacagctacatagttcacctagccatgagaagtgataacaaaacatgtaaactagaatacctttcccagagggccaccagaagcaccggctcctctgcccagaaaatcctaatcagtgtatatacagctagcaccagctgtacatcaccttttcaaaagccaaagggttgcagagggatcacgttgagaaggtgagttctgtaaccttcccgtagacagcaaaaatagaaatataatagagaagaaacttgagcagatatatttcaatagtcaatggtgtaattttatcaagtgatggataacttggaaatattgtacacctaaaacttgtttaaaataaaggattataacagcttattctccaaggccttcaggcggcctattaaagtataaaagaaccaaatgataaataccaaattcaagataaaggagtgtataagatggtaaaggggcacataggggacttcaaatgtactggctatgtttttcagactgagtgcaaacaaatgctattccttatgctgtatttcagattcattgttttttcctgatattaagatgtattttgcagtcatgttatagtttcagtggtagtatttctttctcagtgagacacaagatagttcctctcacaatcagtggtatcttatgtgtgtgaaatagggtcttattcattatatcctctgtattcctttaatactgcatagtaaatggattttaaagggagtaacaattggatctgggtctttaaggatttaacgcttcagagagaagagggcagggtatttaagatgagggagatagtagagcaaacgtaaaagaataccagtaagcatgatgcattcagagaactgtaaagggcttttgtgagataataaatgtgcgtgcacgtgtactaagactacgtcaatcagcaatgtcaaagactgacagaaagggagaaaatagagacaagagtaaagccatctagaagataatatatttcacatggcagacaataaaagcttggaccggaatggcagcaatgagaataaagaagagacagatgagagatttctgttgaatatatagtagttgtcaaggctgaggcaacagatttatgagttaattgtttcaactatcttcaaacattttaagagaaaaaaatcacatacaatagttactaggtcaagccagtaggtgtcaactctagatgcttatcaaaaatacccacagagcattaaaacaacaaaagtatgcatggcttactgaatgagaatctccagaaatctggggagcaaccaggtgtgtgtgtaagctgcaaggctgggactaaaatccactgccttaaactttggcaatatccataaggtcatcaaatccacaaaaagagtttcaatgaggctggaggagactctcctcttcaaatccagcaggaatggaactcaggtggtatttaagggaaatcagggttggttaacatacatccttcaagattaaccactacttctttcacccacccctagaaaatattaaaacacaattaattctatctatcctcagggatggcacctggcagttgataatgaattccaacatatattcacccataatcatcacttcatcatgtgtgccatgcgtcaagtactttttgataagtgccttatcaagtgtctttgataagaaaattggtatagtcctttccttataggaacaccagtctggcaggggtgacacagtattattagatgccaatagagaggcaggatcaaccagttagttgtccagggaaggaaaaaaaaaatatgagctaaatgttgatgttgaaaagatcaactcggggtggggattacaagtaaagaaattagcacatatattttttttttttttttttcgagacggagtcttgctctgtcactcaggctggagtccagtggcatgatctcagctcactgcaacctgcacctcccaggttcaagcaattctcctgcctcagcctcctgagtagctgggattacaggctcctgccaccgtgcctagccaatttttgtatttttagtagagacaaggtttccccatgttggccaggctagtctcaaactcctgaacctcgtgatctgcccaccttggcctcccaaagtgctgggattacaggcgtgagcctttgcacccagccattatttattactactgtcttagagggtagcatacacatctatagcataaatagatgttgaggactttttttttttttgagaaggagtctcgctgtcgcccaggctggagtgcagtggcgtgatcttggcttactgcaagctccacctcctgggttcacaccattctcctgcctcagcctcccgagtagctgggactacaggcacctgctaccacgcccagctaactttttgtatttttagtagagacggggtttcaccatgttggccaggatggtctcgatctcttgacctcgtgatccacccgccttgacctcccaaagtgctgggattacaggcgtgagccaccgtgcccggccaaggacttaatattacatattaacactaatcaataaattttcggacatttccaaacatttaaatagtgttatttccccagagaaattcagatactcttatccttaaaaatatatagcagattaactccataatggaaatattagtctacaaaatcaactgcaaagaaagctttcactaagccaggcacggtggctcacgcctgaaatcccagcactttgggagtccaacgcaggtgattcaggtgaagtcaggagttcaagaccagcctggccaacatggtgaaacctggtctctacttaaaaaaaaaaaaaaaaaaaaaaattagccagacaggggaggcggaggttgcagagccgggatcgcgccactgcactccagccttggcaacagagagagactgtctcaaaaaaaaaaaaagcaagcaaagcaagctttcacctttcactttcacttgaaacatgaaagcggaaaaagaatttgcttaaataggtctattttgtgacgagaataaggttaaaaaaaaaaaagcccattttactttcttttttgagatggtctcacactgtcatttaggctggagtgcaatggtgcaatctcagcttcctgcaacctccacctcccaggctcaagtgatcttctcctcccacctcagcctcctgagtagctaggactacaggcgtgtgctaccatgcccggttaatttttgtcattttttagtagagatggggtctggccatgctgcccaggctggtctcttacctcgccactgcctcctgggttcaagtgattttcccaactcagcctcccaaatagctgggattacagatgtgcgccaccacgtccagctaatttttgtatttttagtagagatggggtttccccatgttggccaggctggtctgaactcctgatctcaagtgatctgcctgccttggcctcccaaactgctgggattacaggaatgcacaacagggccagaccccattttactcttactaaggattttttaactgtttcttgtaagatagtactactgaactgtacaaaggaatatagcagtcagaaaacatttccagctgaaatgttaataaataaaaatacagaggccaggctaggtggcgcacgcctgtaatcccagcactttgggaggccgaggagggtggatctcctgaggtcaggagttcaccatcaggctaacatggtgaaaccccgtctctactaaaatacaaaaattagccgggcttggtggtgcgtgcctgtaatcccagctactcaggaggctgaggcaggagaatcacttgaacacgggaggcggaggttgcagtgagcccagaccatgccactgcactccagcctgggtaacagagcaagactctgtctcaaaaacaaaacaaaacaaaacaaaacaaaaacaaaaaaacaggctgggtgcagtggctcatgccagtaatcccagcattttgggaggccaaggtgggcagatcacctgaagtcaggagttcgagaccagcctggccaacatggtgaaaccctgtctctattaaaaatacaaaaaaattagctgggcattgtggcaggcacctgtaatcccagctactcgggaggctgaggcaggggaatcacttgaacccaagaggcggaggttgcagtgagtcaagatagtgccatggcactctagcctgggcaacaaagcgagactccatctcaaaaaaaaaaaaatacacaaacacacacacaaaaaaaatgtagtggaatgtgaagaaataaagacctcaacaggagacttctttaactccaaattgctcattcagaaaactcatctttcttgctgaaattgtggaggatgactttttcttttaaaccaattaaaagcagacaccacagcagagatccacccaattcttgggacagtcagtgcctgatgggatatgtagtttttagggtagcacgtgtaacaatttaaagtaggaaacacccccttcaattcaaataaaaaattctggtttttttttttgagacagagtttcgctcttgttgcccaggctggagtgcaatggcaggatcgtggctcactgcagcctctgcttcctgggttcaagctattctcctgcctcagcttcctgagtagctgggattacaggcatgtgccactatgcccggctaatttcgtatttttagtagagacgggggtttctccatgatggtcagactggtcttgaactcccgacctcaggtgatccgcctgcctcggcctcccaaagtgctgggattacaggcgggagccaccatgcccagccccaaaattccttttttaaactaatattctagtggcccactattctccaacaattcctactttaaattgttgcatgacccctgtagtaaaaagcatcactcagatctgacaaacttagtgacacccccagtttttacaaattattgacaccccctcaaagctaacagcatgattatataattgggaagagttgttcctaagagagaacatgagttccagagatgtataagaactatctatatgtgtaatctgtactgccagttagccccagaaatgccctggacacaaaatctgtccaagctgcaaacaaaatttgccatctctagcacatcattctgattcaggtggtctttactacaggacttttttcgtgtaacccttagcaagttgtttgaggctaagaagggaagacctgagtctgaagcaaataaaagttatacacaacttttactgacatttttgaacacggatagtattaaaccaagggtcactgtgccaggaggggaaaaattaagtactgtaattatatatattgaattatatatagagagctatccccaggataaaggaatcactgtttactctggtaatgatctggaggtttaaaaacacacacacacacaaataaaaaaaaaaaacaaacactcaagttgactgggccagaaatcttatttgctcttccttctccccaacagttttttatttcgagttagttctatctaaggaatttacacccttgatcacttaagtcaccctaaagtggagtatgtaatcaatattggttattttctcattggagtcttttttgacattttaaagaaatgctatttaaaacagacaatatggacagattctgatggaattattcttgttcacgtactcctttcgtttggacagaggtatctgccggtactgagatgtaagtgatcagctgaagggagaaactgtacaccatgtgacggacaaattacctgcctcaagaaagcacttacgaccattctgcagccactcagtgaccttggctagaaaccaatggctgtgcggcgtgaggtaagatgaaaggaaataccctagggatccaggacttctgcatttggtgaaacgtccgcttccactacaaggctttgggatgcctagtctgtagactggaggagcattaatactgactcacgcagaaaagatatagctacatattggactgggggaaggggtggcaaaaccctctgcaaataggaagtgccacaagagcaccgagataaggatgaggccctgcgtgagcgcagccttcgggttttccttgggccgatcagyaccgactcccccgctctcggcgaggcgcctccagctcccgggaatgagaaatgtgcccgccgcagcaggggcccacaggaatgaagggccccggcgctgcgtaggcccaacagttccccgcgctctcgcccccggcccagccccgcctttcttcccccgcctcggcagaatggactcaccagggrgcgaaraactcgacgagcatgaggcccgcagagcccgtgtmggagatgmgactctcgaagttgtcgtccgtgagttctagcacgtcggaggcagcggcgaggcgggccgcggcaagaagcagcgccacacccgggaacagcgctaggcggcggaggcgcatggcggcgaggtggggtggggacggccggaagggtcgcggctcggctgggactgcggaggtcgggcgcgcgaccacwaaccsgctgcttgcgctcgcgcgtctggcccaggcggacctgcagccggaggtcccaacccccaaacccggcttgggccgctgtgtggcagccgctgattggctgcgcgtcgccttcgtcgggcgggcgggaccaactcgttaccgccgagtggccggagcgcggggcggggccgaggcggcgagtgtctgggcgagcgtggctgggcccggtcctgggctgggggcaggggctagggccgggtcccggggtgagccgaaacctgggggtcgggcggggcgggaaatggggcgcagtgaggctgggagccggccctgagctcgtcctgcgtaggggtagccgggctcagggggcgcctgagctggaggtggaagcgtgaagtcaggactgagtgggcgaagagaacctgggctgaggtgaggcccagaagcgagaatggaggagagaaggagctagcccccgaaggagtgttggagtggacacacttgggacgggacccattttcaaaatgtcaggctttggcattttgtccaatttctcttcacttggtttctcttgcgtgggcaggccaagccctcccccaactccacctcattgcccgattctctcaggcccaggtgggacccaggttcttctttgtccagccccgggcccctgcccttgtggctgctccttttttattgagtttcttgttttgttttgttttgttttgtctgagatgccgtcttgctctgtcccccacgctggagtgcagtggcgcgatctccgctcactgcaagctctgcctcccgggttcacgccattctcctgcctcagcttcccgagtagctgggcctacaggcgcccgccaccacgcccggctaattttttgtatttttagtagagaccgggtttcaccgtgttagccaggatggtctctatctcctgacctcgtgatccgctcgcctcggcattccaaagtgctggaattacaggcgtgagccaccacgcccggactttttttttttttttttttttttttaatgagcttttaattggtagtgccgtcacaaagtgaagatgcctggccacttggtcgactgctcaatgtctttaccactcttagccccttttgtttcaaaaaaccctgagtcttagtagaatgtttgttctgcccaactgctcctagttcgtagatgtgggtacattaaggaatcttaagggcaaagagggtggggaggaggggacagaaaacctgtaatccttggtgcagctccaagaatgaaatgacacttgatgcttacattttcttagcagacatggccgcttaccaacaagaagggcagatgcagcttccccragctgatgccattcgttcacgtctcatcgatactttctctctcatygagcatttgcaaggcttgagccaagctgtgctgcgacacactatcaggagttacttggtcagcagcctatttcttcactaatttaaatttaagactcctatccacatcctctacatttaaragtggaaaattctggggaggccggtttagttgctggtttaccaaacttgataaatcaagggcttgtaaataaaactaaggagatagaatccacgtctttcacttttaggcctaggatagccactagccgtggatgatacggaacagtttctgtcaaagactcttaaaactttgagagtgaacctgctgcttttgtgggcatggacagtgttggtcataagcaatacatttgctctcactccaaacagaattcttagttgctgtgagaagagaaggaccagcagtaagccattagggggacccattatctgaacagtatccctgcccccaaccctacctggtctattttgtttgtatttatccactaccccttttcaatttttgttgtagatccttcccgccagaagaaacttatgttgggagatcaacaccagctagtgggcgtctctataaagcctcaacgtatagaacagatttcacatgcccagaggctgttgagcaggcttcatgtgcgctgcagtcagaggccacctctttctttgtgggccggatgggtccttgagtgtatcctttcatgtcactcatttttatcctggctgttgatcatctgcctaatgacttattttttgcttcccaaactccattgtctcattctcactgcttatgttattgctcttattatttcagctgcataaatcagaaagaactccactctgtatgtttccttaagagacaacaggtcctctcttcaaaaacttcatcatcttcctgatctttttgaatacgatcgtaytgatggttgaaatacgtgagaactgacattgtatgaaagaggaagtgaggccaggcgcggcggctcacacgtgtaatcctagcactgtgggaggccgaggcaggcggattgccaaagctcaggagttcaagaccagcctgggcaacatggtgaaaccctgtttctactaaaaaatacaaaaaattagctgggcgtggtggcatggcctgtagtcccagctactcgggaggctgaggcaggagaatcgcttgaacccaggaggcgtaggtttcagtgagctgagattgtgccactgcatttcagcctgggcgacagagtacaactctgtctcaaaaaaaaaaaaaaaagaaaaagaaaaagaggaagtgggtaggagtaattttttttttctaaattgatcattttacatttttgaatgtcatttgaaatgtgacatttatattaaggacaattaagcctcctggagtagaatttatgcaactgctaaaatctagaaatattcgctgggcacggtagctcacacctgtaatctcagcactttgggaggccgaggtggttgaatcacttgaggtcaggaattcaagaccagcctagccaacatggcgaaatcccatctctactaaaaatacaaaaaattagctgggcgtggtggcggacacctgtaatcccagctactcaggaggctgtggcagaataacacttgatcctgggaggcggaggttgcagtaagccgaaatcacgccactgcacctgatctcaaaaaaaaaaaaaagaaatattaatatttggagggctctcaagcgtatactagatacagagcatctagacacataaaactaggtgtaatatgtagcaatgtaacaaatccacaaggaattgaacttgggaagaccagttttatttctgttgtcagtttaggctgacaattgtttgcattaaccttttctgttaaagatattggtgcctatcggtgaatgatctaacatttacattttttttttttttgagacggagtttcactcggtcgcccaggctggagtgcagtggcacgatcttggctcaccacaagctcagcctcccaggttcacgccattctcctgcctcagcctccgaagtagctgggactacaggtgcccgccaccacgcccagctaattttttgtattttttagtagagacggggtttcaccgtgttagccaggatggtctcaatctcctgacctcgtgatccaccmgcctcggcctcccagagtgctgggattacaggggtgagccactgcgcccagcctaacatttacatttttacaagtatatttagaaatattattcaagtaaaaataagaaagctcacaaagtatggaaaggtaggtaccactaagatattagctgagccaaaaaaattacttaaaaggaaatgattcttaaaccaataataaattatatgaaacatattcaaaacataaggatgtctgcaaaatcagtgagctcatttgttgataatctcaaactgctcagaaatgatgaaaggacagtagaactactcacttgtttcattctcactgttgtagagaagtctyccactttattttttagtgacagagtctcactttgttacttaggttggagtatagtggtgtgatcatggctcgctgcatcctcaacctccagagctctattgatcctcccacgtcagcctcctgagtagcttggactacaggtgcatgccactacaccaagctaattatgttgattttttttttgtagagacagggtctcactatgttgtccaggctggtcttgaactcctgggcttaagtgatcctcatacctcagcctcccaaagtgctgggattacaggcatgagttaccacgtccagcctaggaggaatttttaagagaagggcgtagttatgaagctcttggctgtttatgtcacacagatattttcctcaacagaagtgtccagtgccggtagccagttcagaactctgcctctagctccaagtcccctacaagcttatctctggggcccaggcatggtggctcatgcctgtaatcccagcactttgggaggctgaggcaggaggattgcttgagctcaggagtttgagaccagtctggccaatgtggagaaacctcatctctacaaaaaatacaaaaattagctaggtgtggtggcacatgcctgtagtcccagctactcagtaggctgaggtgggaggatcgcttgagcctgggaggcggaggttgcagtgagacatcgtgcaactgaactccagcctaggtgacaaagtgagaccctgtctcgaaaaaaatagtcctttactgcagtcaggtcaaagatatttaaataaacaacaataattgatgtcacggacccactacagtatactatatactttgaggtgttttatttcctcctcataatggtgaagattttgaactaagttacttataattcccttttattgtatgattgctgccatgtatttgccttgcatggctaggattatagtactaagccttggaatgaagtaaataatagtaactatacaggatttcctagatcagtggtccccagcctttttggcwtcagggactggtttcttggaagacagtttttccatggatggggtaggagggaggtttcaggatgaagctgttccacctcagatcatcaggcattagattctcctaagggtcacgcacatgcagttcacaatagggcttgccctcctatgagaatctaatgccgcagctgatctgacaggaggtggagctcaggcggtaatgctcactcacccaccactcacttcctgctgcatggccgggttcctaacagaccatggactggtaccagtccgtagcctggggcttgggacccctgccctagatctaatagacaaatcaaaatagaatagcactaactattctatttggtaaaacagttaactgaatatgaaacatgrtcactgtgtcagaggataagtagattgccagactagaaattatctggcaagctcgtggaaattttatcttattaagyttattcttgtgggagaaacggaggagggattttgcagagggaaattatttgtgattaacagatttctttgaacagactaattcatatgataaacattaagactttttttaggcttaaaattttttttccagatcacaaagcgatctaaactgttagggctttaaaaaatctacttccacaactggatattggtaattctgttttgcactttattttttaaattttattattttattattattattttttgagacggagtctcgctctgtcacccaggctggagtgcagtggcacgatctcggctcactgcaagctctgcctcccaggttcacgccattctcctgcctcagcctcccgagtagctgggactacaggcccctgccatcacacctggctaattttgtgtatttttagtagtgatggggtttcactgtgttagccaggatggtctcgatctcctgacctggtgatccgcccgcctcggcatcccaaagtgctgggattacaggcatgagccactgtgcctggcctctgttttgcactttaaacatcaattggcttatttttaaaatcttgtattttgtttcaaataatgagaaagaaaaaatgatttgactcatttgcaagcctttgtcagaaaataacacattgcaagtgtagacaatctctacttaaaattaaaaactgagtatattaggagggtgaggtgggaggatcacttgagcccaggrgattgaggcagcagtgagctatgatctcaccagtgcactgcagcctgggtgacagagcaagattctgtatcaaaaataaaataaaacctaagtataatatcattacaattttttcccaaaggtgggcatattcctgaagattacaattttttacattgacttttaaagtcctagagagggtttgatgtgctatataaagtttttggtcatatgaatggaatttatagaatctgatgaagatcatcttgagattaaacttgcagaattgtcattcttttttttttttttttttttttgagacagactcttgctctgtctcccaggctggagtgcagagacgccatctctgctcactgcaagctccaccccctgggttcatgccattctcctgcctcagcctcccaagtagctaggattacaggcgcccgccaccacgcccagctaattttttgtatttttagtagagacggggtttcactatgttagccaggatggtctcgaacttctgacctcgtgatccgcccgcctcggcctcccaaagagctgggattacaggcatgagccaccgcgcccagccagaattatcactcttaatgctcttcatgaaattgtatttctggctgggcatgtggctcatgcctgtaatcccagcaatttgggaggcctagtcctgcggatcacttgaggtcaggagttcaagaccaacctggccaacatggtgaaaccccatctctactaaaaatacaagaatcagtgggtatggtgatgtgcacctatggttccagttactcaggaggctgaggcagaagaatcgcttgaacccgggaggcggagtttgtagtgagctgagatggcagctgggcaacagattgagtgagactccatttcaaaaaaaaaagaaagaaagaaattatgtttcaacatcagtgttccttgtttcatgatggatataactagccaaaacattactaaaaatattaaaactgtaaatgtcaaaatctacataacagtttattgttacagtgtactattctcctcacctatagtattggactccttgaaaccaatgtgaatttacctggtattctgtgaggtgacctactgttgtttttctagaatagggagtagcaatagatgactgttcatggtgaactctaccttgtaaaacagaattatgtatttgcctgacttgcttgatcaaatggctactgtctgtcaccctgagaagaatattgaaacatagatgttcactgctacttcacttcactggctaagattcctgggtagacttcactgggctcctggtctctatttccattaagactcctttgctttgctatagcagcctgaaaaattccaagaattttaaaaagttatttttcatcttcagagaggacacattacttgatgtagagtggaggcagtcacttctgcacattctgtgctgctgaggcaatttctgctattcgttcctctgaactttccttgggtttgtttagcttctataaaattattcatttttccagagagtaaaagtgctactgcttctataatttggacttccctacttaaactattttaaactactcaaaactatattctgctttacaagagccttattttacttcattgctctgtttgggttcctgttttgcaagggcaaaaactgaataaaaattatagcattctattttccagccacaaatgtggtcctcagctctttctaattatataatcccatgctcctgagagctagaatttattgttaagtgaaaaaattttgtattttattgaatttaagctgtcatcaatggtgaaattcactgtttaccaataagaaataaaaatcatgctcaattaaactgggacacatcgctggttgtaaaatgcatcctcactttgggaggccgaggtgggcagatcacgaggtctagagatagagaccatcctggccaacatggtgaaaccccgtctctaccaaaaataataaaattagctgggcatggtggygcagaggcagaggttgcagtaagctgagattgcaccactgcactccagcctggmaacagagcgagattccatctcaaaaaaaaaaaaaaaaaaaaaaagcatcctaatttcatggatgttaaaatgtgaaatattgtccatcttagagaaatgtgcatgaaagaaaaacttacggaagaagtacagagcctaaataagcataggagtgctgggtgcagtggctcatgcctataaccccagcactttgggagaccaaggccggaggatcgcttgagcccaggagtttgaggccaacctgggcagcatakggagaccccatctctacaagtaatttaaagaaaaaattagctgggcatggtgacatgtgcctgtggtcccagttacccagaggctcttgagcccggaagatccaggcttccgcgaactgtgattatgccactgcactcctccagcctgggtgacagagtgagactctgtctcaaaacaagcataggaataagtatagtgtaaccccattggtttttagaaggggccaacctctgtaaaattctagggatgatygaagtatggttctgttctttttgtctggatccagttcagcatcaggatgaatttaaagccagagcaccacaatgttgatttctatttagctcttaagccattttaatttcagtgtttttttttctagagcatggcatacatccattaattgtataaaagagatgaagaaggttgaaagagaaaggcaatgaattaaggaatagcaattggtaaataataaggttctagagaggaagtatgcattcaatttgctttgcagaacaaaaccaattttaggcagggaagaaaggaaaagttttaaaagaaagctaacagaaccaagtgatttattgttataattcgatataccctaatgattgtggcttgtttctacattcgttataaagtagttcagatatcatggccctgtattttcattctgttctcaagacccattgctttcttgtgaactttgggactgagataacagtacagtagatgggggtggggggttggaggtaggggtaattaaagagagtagtctcttagtagctgtgtgagccccagagtggatcgcaagtgacttgtagctgggcagacataactatatgaacagattggttgtggctgtgttttatggtcaattctgtccttccctgtatttcacaggttgaagcaacagtgttaagaagagaaactcttaactcttaacacagtgtgaagaaaaatggaacagtagtgggcaaaactgtggtttataagtgtgttcattctccatcattcggtttccagcttccttaacttttattcctcctttgctctatcytcacagaattgctggaatccacaaataccaaactatggccattgaagctgaccttggaggtggcagcttggtttatcttgcttattttcatcctggagatccttcttaagtggctatccaacttttctgttttctggaagagtgcctggaatgtctttgactttgttgttaccatgttggtaaggatagagatcctgagggttcgtttagtgggatgaagaatgtgcctaggtgaatcgaaagaacaagttaacatgataataggaagaaacaaaaatttacttaacttctttcttttgattttttttccctaaaactaaacatcaatcattgcaggagttgttggtattaggagcaaagtagactaactacaacatcaatgccaacaagagcatctgccggttactgagcacttactaagtgccaagcattattttaagtgttttccttacattatctcatttatgctccacaacaaccyaattaaataaccatgaattttatccccctttttatatctgaacaagttkaagtatagtgtttaagcaacttaatatagaaaggctgaatagtaagcacttctcagagaatgctattcaagggataacgcccagggaacaatgaagaggataagatgaagaagctgcaattctgcctgggtgccttggggtgtattttacttataacctgtgtgttttccacagtccctgcttcccgaggttgtggtattggtaggggtaacaggccaatcggtgtggcttcagcttctgaggatctgccgggtgctgaggtctctcaaactccttgcacaattccgtcaaattcgagttattattttggtcctggtcagggccctcaaggtgatttgactgttgcaagctaaagcagggggcaaggtagataaatgtgagggcttaacatagaatatgaaacaaattggccgggtgcggtggctcatgcctgtaatcccagcactttgggaggccgagggggatgggtcatgaggtcaggagttcgagaccagcctgaccaacatggtgaaaccctgtctctactaaaaatmccaaaaaaaaaaaaaaaaaaattgccgggcttggtggtgtgtgcctgtaatcccagctactcaggaggctgaggcagaagaatcacttgaacccaggaggcggaagttgcagtgagccgagactgctccactgcactccagcctaggcgacagagtgaaactccgtttaaaaaaaaaaaaaagaatatgaaacaaatctggatgggtcaaagaaggcaatgaaacgtcctgtgaaatgttattggatgagaaggggctggggacaggtgccatggttcaragatgactgggttcagcagtgcaagagagggtttggtgggagattgccaggtgggcttgactgggctgttggtggagatcagcctagtctggcccacatctgacttgagtttatggcctctagagcatgactttcctcttgatgttgctgctcatcttctacatttttgttgtgactggtgtctacgtcttctcagagtacacccatttacctcgtcaggacctggagtatcatgtattctcgtaagcagagctgagtgacagctgagtgaggggagaaaatttggctaagagaccaggaagcttgtccaaagtatagtaatataaaaagtacagtctattccaagaaactgaaatagaacacaatagggagagggaaagagaaagcaaaagaacagtgaatggtattagctctgatcttgaggttagggcagctagttccatgtttattctgggttttgcaaattcaaaccacactgtcatcaggcatctttaaatagcggtacactccagtggttgagcttggtttctgtgactcagttacgtcttttgaaaactgggggccaggcacagtggctcacccctgaaatcccagcactttgggaggctgaggcgggtggatcatgaggtcaagggatcgagactatcatggccaacatggtgaaaacccatctctaccaaaaatacaaaaattagccaggcgtggtggcttgcacctgtagtcccagctactcgggagkctgaggcaggagaattgcttgaatctgggaggcagagattgcagtgagccgagatcatgccactgtactccagcctggcaacagagcgagactccatctcaaaaaaaaaaaaaaaaagaaaaagaaaagaaaaatggaaataggctgggcatggtggcttacgcctgtaatcccagcactttgagaagccaaggygggtggatcacctgaggtcaggagttcgagaccagcctggccaacatggtgaaaccctgtctccactaaaaatacaaaattagctgggcatggtggtgggtgcctgtaatcccagctactcgggaggctgagacaggagaatcacttgaactagggaggcggagattgcagtgagctgagattgagccactgcactccagcctgggctacaaagagtgaaattctgtctcaaaaaaaaagaaaggtggggggaataatagcagtgctacttcataagagtgtggggttaaatgtggtaatgcatttaagcacttagcacagtatgtaacacgttataagtgatcaattaatgttactatgattctcaaatatgatcactggttttatcccaatctctacatattacacatgcacacgcctattcctgatctctgtctagaaaacactaatcagtgctcacttcggcagcacatgtactaaaattggaacgatatagagaagattagcatggcccttgtgcaaggatgaaacacaaatttatgaagtgttacatattttttaaatattaacaaaacctcactaatcagtgttttctagaagaaaatcagcttgaatttagagtagataatcttgcttatgaattataattcaatctggtcagcgcctctcaggactctgttagactctaacagatagttttgtaagagtattgagttaggaaagtcctagaatttatcctatacaagctctgatgttttcaataaattgtgtatggggaactaaaaagaaaggtaggaaaatttagataccttcccggaaactttttacttttttagcaatttttaaatattattaattttataatttgtatatattcattatttaggatcacatatgtttatgtaacatacccatttacttgcatatcatttcataccagcaaactaataggaataattttttgaatgatcttctattttgctaaatttgctaattttgctaaattttgctaaatttacgagtgatcttctattaagtggagtccatagagcagtggagaataaaattagaaaaaaccgctgggcatggtggctcacatctgtaatcccagcaccttgggaggtggaggcaggcagatagatcacttgaggtcaggagttcaagaccagcctggccaacatggtgaaaccctgtctctactaaaaatatgaaatatgaaaattagctgggcatggtggtgcacacctgtaatctcaactactcgggaggctgagtcaagacaatcacttgagcctggggggcagaggttgaagtgagctgagatcacgccactccagcttggatgatagagtgagactctgtctcaaaaaaagaaaaaaaaattagaaaactatctagttggtgattcattcatctttaaaaaattgatctttaaaaattcattcatctttaaaaaattcagtcaatacctatttattatttattataccccaggactaatggagtagtgagaggtagtcacagattattcatgataaaggagaatttaggctgggtgtggtagctcacgcctataatcctagcattttgggaggctgagactggtggatcaccttaggtcaggagtttgagaccagcctggccaacatgacaaaagtttagtagagatggctctactaaaaatacacaaattagctgggcgtggtggtgcgtgcctgtaatcccagctccttgcggggctgagacgagaatctcttgaacccatgaggtggaggttgcagtgagctgagatcgtgccactacactccagcctgggcaacagagcgagactctgtctcaaaaaaaattaaattaaattaaattaaattaaaataaaacaacttcaaacaagaatgattagctaaaaacagtatggtagaaaaggagccaaaatcagaacaaactacaaagaaatgctttatgtttctttgaaagtaggaatgataccatttttgaaaggtttaggtctctgcttccgtctattcacatgcytttttctttagggacctcccgaattccctggtaacagtgttcattctcttcaccttggatcattggtatgcactgcttcaggacgtctggaaggtgcctgaagtcagtcgcatcttcagcagcatctatttcatcctttggttgttgcttggctccattatctttcgaagtatcatagtagccatgatgggtaagcatagaggaggtgaaacttgtttgggaagtgtggttgggaaaaagttattctgaaagctgggattggtggcttatgggtataaagaacctagtgtagcaggaaggcttgggttctggattggatatttcacttggattctccccacccaagccctcttcccaagtctagtcattaccatctcccagctcctaatggccctttggggaagtcaytaacttkcagaatatcaggaaagagctgmatgaggagatggcatgtcaggaggttcagctcaaagctgayatgttcaagcggcagatcatccagagatctacttctcccttttcaaccccaactttccttctcaagggtttcctgagctcatttcttgtttctrctcctygaccccacttttccctttgtgacagtagatttgcccccaaggataagaattctccagctctagaatattgcctgattcttcatccactgtggggwgtcctccatttttttcaccccgtgactacaatttgttctccccaattagttttcttcactttctgatatgaactctttttttcttaccacacttttgcttgaatataactgtctttgctcttttttcttttttttttcttttttttttttgctttgcaggagaaaaaaacatgtcacgtgaggcactgaggtcaagccacagcaaaatagatgccaggttaggagtatgtatgtgaactgggatagaaacacatgaaggaggagagggtggaaaactaaagatgaagattggctttgagagataattcattcatttaataactgcatattgtagtaggttgactagtggcacccgaaataatatgtccatgtctttgctccctggaacctgtgaatgtgaccttatttggaaaaaaaaaaagatcctaagttaaggatcttgagatgagatcatcctagattatccaggtaggtcctaaatccaatggcaagggtacttataagagttgaaagaggagaagacacagagaataggagaaggcgatgtgaagacggagatagaggttagggttaatgccgccacaagccaagggaagctgaggaatgccaggcagctgccagaaggtagaagaggcaaggaacttctcccctaaagcctccagagggaatatggccctgccaacaccttcatttcagactctagcctctagaattgtgacggaatatatttctgtcattttaagctaccaagtttatagtaatttgttatggcagccacaggacactaatacaaataccttccatgaaacagatatgattctagaccccaagtgtttagcagtggacaaaaaaagcagaagcrgaagtaaactcattcactyattaacaaataattactggstggatgtggtggcttacacttgtaatcccaacactttgagaggtgaaggcaagaggattgcttgaagttcaagccagaagttcaaggctgcattgagacatgattgcaccactatactccagcctgggcaacagagcaagatcccatctcaaaaatttagcagggtgggcatgggcactcatgcctataataccagcattttcgaaaactgaggtgggcagatgacttgagctcaggagttcaagactaaactaggtaatatggcaaaatcctgtctctgcgaacaaaaattagctggatgtggtggtgtgttcctgtggtcccagctacttaggaggctgaggtgggaggactgcttgagctgagaggttgaggctgtggtgagccgtgattgtgccactgctctgcagcctgggtgacagagcaagaccctgtctcaaaaaaaacaaacaaaaacaataaagaacaaataattattgaatacttagtaggtgcttgggatgttatcagtgaacaaaatagacaataatgcctgcttcatggagcttacatattagtagtggtaaagagataataagcagtgaatatattaagtaatctgttaaaatatgataagcattatgggaaarttaaaagtagaacaggttaagggagattgggagtakaaggtgggattgcagatgggttgtagtttttttttcttgagacagagtctcgctctgtcaccaggctgtggagtgcagtggcacgatatatcggctcactgcaacctccgcctcctgggttcaagcgactctcctgcctcagcctcccaaatagctgggactacaggtgcctgccaccatgcctggctaatttatttgtttatttttttgtattttagtagagacgaggtttcaccatgttgcccaggctggtctcaagttcctgagctcaggcactccacccgcctcagcctccaaaagtgttaggattacaggcgtgagctatcgtgcccagccgcagatgggttgtagttttaaacagggtagtcacggtgacctcattgaaaaggtaatgtgagcaaagactcgaaggaggtaaagggattaccatgtggatatctgtaagaagagtgttaataggcagatgaaacagctagtgcaaagctcctaagctggatgcatgcttggtgtgtttgagaaacagcaaagaggccattgtgactggagtagagtgagcagggggaagagtgctgggaaatgaagtcagagagagaatggtgacctgatcctgtagggttatgggtgccattgtagggactttgaaatggcaagcagaacagaggggtgacatgaagtgacttacgtttaagaaggattactctggttgctgtgttgatagaagaacaagggaaggagyagagagatcagctgggaggctatgctgctgcccaggcaagaaatgatgacagcttaggccagagtggtggcagtgagttattgagaaaagatatatttcgaaggtagagtcagcaggatttcttgatggactggatatgggagggaagagaagagttaaggatgacacatgaatgattgaggttggaagtgcctgagtttagagtttgggagtagtttggccctcattgtcttatgccccagctttagggggtggccaggggcagaaccagaataatgagtggactagtcatatcttgtaaatgtttgtgaagccataaatttcttctttaagttcaagaggagctagtcaacaaagggaaagtttggacttatcagaagtgtctgaagtagagtctaattatggtgccactgaagaggatttaataasatctgcatcaaaaacagaagagaccttgtcaaaaaagagagtaccagtcttcctcctgtgtctcatccacatcctcttcctattcttcctcttctgaatccagattttctgaatctattggtgagccgaagaactataataatgagttttttccatttgaattcagactcctctttaagacatcttagtcttaacaggagctctcctactatatctcctttccaattttctggtcttaattactttctttttgcttcttaatttcccctgtacttcttcttcrcttygggtaagtgtggcygtggcctctttgctcattgtaaaargtggtttcttgctgatgcaccctttccctccttgcttcctgttacctctttccactccacctttccacccacaccataggatttaccagctcttacccagcttttacaaatctagacatgcttttctgaagcattcctccctayaggtcrtttggactgggaaactcttgtgcacgagaatctgcccaggctaatggaaatggatcaggatgaccgtgtttggcccagagactcactcttccgatattttgagttgctagaaaagcttcagtgtaacctagaggagcataagaagttacaagagtttgcaggtatggagttagggcagtcatggggaccatgggaatatatatatagcatttatagctgtggagaaggaggagggtgtccactattctggcatttcagcttctcaatttctgcctacacctaaaataggcaaattcttggtttggtatgtcayattctgggaatgtgtcccasttttcyctaactgagagagaacctagaaactctgcttctgtascaggggacacccaaatcctatgaggtatgagagcttatttcccaagaagagaaagtctaatcccagttgttgggaattaggacaaggtaggctcttgcttgatttgggcagcccaccagtttctgcacgtttrttctctctgaagattgcatttcagacttgagcagcagggcctaagcctcaagctggagagctatgggggatcagacaatgagcaggatgcccacaagtgctcactgtcctaactccctaaagaggtttatgaattctaaacttctgcttgtatctgccccttctagtgtcagcctctataaagataaatatgtgatttaaatagtagagtttgatgtaaactgagaactatccaaaattatttttcctaaatttcattactctctgactaatttggattaatacaatttccctctaaaaggaaaaaaaaaggctgggcacggcggctcatgcctgtaatcccagcactttgggaggctgaggtgggcagatcacgaggtcaggagatcaggatcatcctggccaacatggtgagaccctgtctctactaaaatacaaaatatcagccgggcctggtggcacatgcctgtagtcccagctactcaggaggctgaggcatgagaattgcttgaacctggaaggcggaggttgcagtgagcggagatcacgccactgaactccagcctggcaacagaacgagactctgtctcaaaacaaagcaaaaacagaacagttaagggcagatttttacaatttaatatgtgttatctggggtttccccctcatatctagttgaaatcaactcagtttgaaaataagaaattagagaggaggactgtgtgtttgtgygtggtgggcacaggtgggaaatgaggaatttataatattggaacatggaatttagggcaagatgtgaaagacaggctttgcttacttcacaatgttgcctaaatttaatcctgttccttctagtcattcttagccctgccttcccacttattctctagggaggacagggtgaaaaggaggaaaatgcagcaaggtrgtttctttaatcctgataaacttgtctatggcaaagagtacacagaatcataaggcttaattaaaagattaataaagacttttgtgggaacctggaacccagaaaagcaaggtcttcaccaaacatttatatatgtagaatattcttagctctccagcctcacaatctgtttcctttgcagtgcaggcactgatgaacttggaagacaagtaaagcaatggatggcttcaatatccttgggcccagcaaaagataatgaagggaattgttggaaatagagaattgaaaatataaacattcagatagaacaatatctgttcattaaaattaaaaagtataagtgtctaggccgggcgcggtggctcacgcctgtaatcccagcactttgggacaccgaggcggatagatcacctgagttcgggagttcaagaccagcctggccagcatggtgaaaccctgtctctgctaaaaaatacaaaaaaaaaatttagccaggtgtggtggcagatgcctgtaatcccagccactctagagcctgaggcaggagaatcacttgaacctgggaggcagaggttgcagtgagccaagatcgcaccactgcactccagcctgggcaacagagtgagactcggtctcaaaaaaaaaaaaaaaaaaaaatatatatatatatatatatatatatatatatatatatatatttataagtgtctaatagatgctcctagtagctgctcagtagtctgcctctgggataagggatattgaaaggcataaagtcaagcaaaagagttagttcaagctgagtgtggtgatgtgtgcctctagtcccagctatgagctgaggcagaattgtttgaggccaggagttggaggctgcagcaagctaggatcataccactgcattccagcctgggcaacatagcaagaccatatctctaaaaaagaacaaaacaagttagctcagatgccagcggagtctgtgctccttagctttctaccctttccacagctcctgaatctgactcatttcttgactttatcattatagcttccacccttcctgcaacctctactgcctgattagagtcctaattttaccctctccctccctgatgcataggtaaaggcccctctgtggagtaaggagatcttcagagctgttagtgtaactaattgagaagtattgtttccattgcgtgttctactcatgttgcttctcttgtgaaccattaactttaattggatattatttttacctgtttctggaccgaaagtctctttatttcattttgccattgctcagggcagtgctcaaatcagtaagtgttgtacaggtttttagtgttagaagggatttcagagttaatctatctcccatcaaagcaggaacaccttttagaacatcactgaaaggaggattatccaggtaatgcttaatgtttctagttatttgggatttattatctagaagggatcccattccatcgttagaagacttaagtctttagacatgtttattattaaaaattatatcacttattgagtgtttaacatgtatgaggatatttatatatttagtatatatatactgtatatagagtatgcatatttcataaaataatcatatatggaagatagcgtcacatttttagagatcagaaaactaaggcctaaagaaattaagtaagttaagtagcttgcccaagagcacataccaagtaagaggtagagctaaggttctaactcaggttaaaaattctgagttgagaaaaaaatcagttgaagccatttaaacaataaaatagcttactggagactggaaaattcaaaggtagtatagcttcaggattgatttaatgtaaaaattcactgttgttagatctgtggttttgtttctctggaattttcctgtctgcgctctcctccacgtgttcttgttattctcagactggcttcacttgggtagccagacaattttctgaagcgcctaggcttgcatacctatttccccatatgcaggggaagagagccggtgactcctttctcagtcaatgaacaaaatttttgagctttgggtcacaataatggttattcttggagtgaagatactgatggggaggaagcatgaagcatctggagtgctatagatatgttccatatcttgatctgcatggtggttacaccggtatatacagatgtaaaaattcaacaaaatgtacacttaaaatttgggcattaactgcaggtaagtcaacctccactcctctaaagatatcctgaccaccactctgattgcaccaagaagttaggtcatatgcttacgtctgaacaaattgttgaggtaaggtggtggatgtgatgaaatcactaattaaggctttctcctgaactggaggtaaggtcagtaacacccaaccttacgtaagggctgctacccaagtggggaagagatggaagggggcaatagggtggtaattataaagtcctcacctaagagtatgtctggcaaaaaggccaagatggggaaaaggcaaatgaattgaatgtccagaataaacaaatctatgaagacagaaagtagattagtggtttcttgggggttggggagggaggaattgagactgacagatgataggtatagggtttatttggcaggtgatggaaatgttctggaattagatagccttgaatagttcaacaatgtaatatatttaaaaacactgaattgggccaggtgtggtgactcatgcttgtaatcccagcagtttgggagaccgagtcgggtggatcaccttaggtcaggagttcaagaccagcctggccaacatggtgaaaccccatctctactaaaaatacaaaattagctgggcgtggtcgtgggtgcctgtaatcccagctacttgggaggctgaggcaggagaattgcttgaacccgggaggtggaggttgcagtgagccgagagcgcaccactgcactccagcctggtcaacgagagaaactctgtctcaaaaaaaaaaaaaaaaaaaaaaaagagctggactggagcatcatccattgaacttgtcaatcagaatacaataaacatcataaaacagaataaggaagcattatatcataaatcttacatatattatccacaaaggagatgctcttgaatagttttgctcaaagtgtggcctgaagatgagcagaattggcctcatctggtcatttgttagaagtgtagaatctctcactagcaagagactaaaaaataattaaaaaaataagtatagaggccgggcatggtggctcacgcctgtaatcccagcactttgggaggcagaggtgggtggatcacgaggtcaggagttccagaccagcctgaccaacatggtgaaaccctgtccctactaaaaatacaaaaatcagctgggcgtggtggcacacacctgtaatcccagctactcaggaggctgaggcaggagcattgcttgaacccgggaggtggaggttgcagtaagctgagatcacaccactgaactccaaccaaaaaaaaggaaaaagaatctcaggccccattccccaggcctattgaatcaggtgatgtagctgcacataaaagattcagaacagccgggtgtggtggctcacgcctgtaatcccagcactttgggaggccgaggcaggtgaatcatgaggtcaggagttcaagaccagcctggccaacatggtgaaaccctgtctctagtaaaactacaaaaattagctgggggcggtgtaaggcgcctgtaatcccagctactcaggaggctgaggcaggaaaatagcttgaacctggctggcagaggttgcaaaaaaaaaaaagattcataaggcactgcttcataggtatttgatgaatattccctccttcccttttcccccaaaacactacacagatataccctcttgactttttcttttcttcccttttctttttttcttttcttccttttttccctccctccctcctttccttccttccttctttccttcctttcttcctttctcccttccttccttccctctccctctctcccctgccccttctctctttctttctttttcccacacagagctggctgtgcaggagactggagttttactattattactcaaattagtctcttctgacgtttttgagacggagtatcactctgtcgcccaagctgcagtgcagtggcacagtctctgctcattacaacctccgcctcctgggtttaagcgattctcgtgcctcagcctcccaagtaactgggactacagtcacacgccaccacacctggctaattttcgtatttttagtagagatgggttttttgccatgttggccaggctggtcttaaactcctggcctcaagtaatccgccgctcctttgcctcctgaagtgctgtgattacaggcgtgagccaccgtgcctggcctgaatgaagcttttctagcatacattttctctataaggcactttacagccttcttgctattaagaacaccacacaacactttggcattaagcttaggagccattttaaacggtgaaatcaccaacaaacagccccaaaacacaaaaagtgcatcactagatagagctcaaaaaagacactggctgggcgcggtggctcacgcctgtaatcccagcactttgggaggccaaggtgggcggatcatgaggtcaggagattgagaccatcctggccaacatggtaaaaccccgtctctactaaaaatacaaaaaatagctgggggtggtggcacatgcctgtaatcccagctactcgggaggctgagggaggagaatcacttaaaccagggggtcggaggttgcagtgagctgagatcgccactgcactccagtctggtgacacagcaagactccgtctcaaaaaaaaaaaaaaaaaagacactaatatttacaccatgagagctgcaacaagaaggcagagcactgccttgttccacctcagctgggaacgtgtatatcaggtgactccaacttgtcacctctcaatacaagtctgtgaatgacctcaatagcactgtaagtattgattttgggttacaaacatttagtgactaggcaaatccacaaatacagaactcacaaatgacaaagactgactgtaaatgctgtggtaatttggagcctcgggctattttgaccttgtgacactgccatctcaacatgtggtttctaggttgcctcaacagggaagagattgttggaggctcatttgctagctcttaaattctttgttcaaccacagtccattgaacagaactaatcacctgagcccagctaactgcaagagacctgggaaatgtgaaaaacacctagatatctagtaagcaataaatatttcagttaccaaagccaaaccaaaaaaagagaaaaataattgtactttacaaagagaggcatctggctgggcatggtggttcacgcctgtaatccaagcacttgggaagccgaagtaagtgaattgcctgagtccaggagtttgagaccagcctgggcaacatggggaaaccctgtctctactaaaaacacaaaaaatcagctggacgtggtggcacacacctataatcccagctactcaggaggctgaagcatgagaattgcttgaacccaggaggtggaggttgcagtgagctgagatcacatcactgcactgcagcctgggtatcagagtgagactcagtttcaaaaaaaaaaggaggcatctgttcttttttgttgtttttttttttttgagatagagtttccctcttgttgcccaggctggagtgcagtggtgggatcttggctcagtgcaacctctgccttccggtttcaagcgattcttctgcctcagcctcccgagtagctgggactacaggcacatgccaccatgcccagctaattttttgtattttttagtagagacagggtttcaccatgttggccaggatggtctcaatctcttgacctcatgatctgcctgcctcagcctcccaaagtgctcggattagaggcgtgagccaccgcaaccggttagggaggtatctgttcttgtcaggcagagagtatcctgtgggagttttggggagtgaggatgtttcagagttctcaactcctgtggctcttcccaggtatacccattctaactggcagatcacagagtgttccagttatcaccagtcttatccatttcattttagcaggacatatgattaatttcttgttctggacctttgtaatttaaatttgctggttgttctctgtttccatttggtcatctgcaggttggaacttgtctcgc

SEQ ID NO: 97088 - DNA, 61612 bp, Homo sapiens
  misc_feature (1)...(61612): n = A,T,C or G
cggtggcacatgcctgtaatcccagctactcaggaggctgaggcaggagaatagcttgaacctggggggcggaggttgcggtgagccgagatcatgccattgcactccagcctgggcaacaagagcaaaactccatctcaaaaaaaaaaaaaaaagaaaagaaaagaaaacaaagaagaaactgatataaaatttagggatggtcattgcttctgttcaaatactcctggtgcaccagcacagtggctcatacctataatttcagcactttgggaggatgaggtgggcagatcgcttgagcccaagagttcaagaccagcctgagcaacatggtgaaaccccatctctacaaaacaatcaaaacttagcagggcgtggtggcacgcaccattatactccagcctgggcagtgggagcgaaaccctttcttaaaaaaaaaaaaaaaaaccaaaaaaaacacacaaatattcgtggttctcccccttccaaaaaggtcactgccctccttgaaggtcaacatggccacatgatttgctctggccaaagaaatggcagcaaaaatgacaaggctcacctctaggcaaaactttaagagcctgaatgtagctcttcacaagattccctcctcatgtaggtatacttgagagacgatgcctcgatcagcctggatccctaaaggactccaatctacagagcctcccactgacctgaaagtgtgttaaattactgagattttgtggttgttacctcaacataacctattctatcctgtctatgaaatgcagatttgtagcacaataacattttagaatcctaagcagatacatacaaaaccatccttctacttcccaagggtatacacataaccagactaacaggtggaattataaaaccatataaatatcttagaatggttgagtgggtgactaaaacaaaagaaaatggggaaaaaaggaatgagcataaaggggaaaagaaaaggaaaagacataaaaaggtttattaaacccgttgtgcaaatattagaaatttcattcactcactgactcaacaaacatctatggacctattatgtgccagaactattttgggtgtacttacagagtggtgagtcaaaaaaaggcagtgcaggctgggcacagtggctcacgcctgtaatcccagcactttgggatcacgagatcaggagatcgagaccatcctggctaacatggtgaaaccccatctctactaaaaatacaaaaaattagctggacgcagtggtgggcgcctgtagtcccagctacttgggaggctgaggcaggagaatggcatgaacctgggaggcggagcttgcagtgagccgaggtagtgccactgcattccagcctgggcgatagagcgagactccgtctcaaaaaacaaaaaggcagtgctgtgcttaaagtttatagtgtacaggagagataaatattaagaacaccccaatgaaaaattacaatgattaagtcttattaaaagctcaggtgagcgccaggcacagtagtacccacctatagtcccagctactcaagaggctgaggtggtagaatcactggagtccaggagttcaagaaccagcctgggcaacataccaagacccccataccaaaaaaaaaaaaaaaagcagcagctcaggtgacatgacaaagagggaccacattcctctgagatgcttataaacatctcagaggaagtgacatttaggcaaataggtgaagactgcttcctgcctacctagggaaggaggagtgattcattccaggcaaagggaacagcatgtacagaggcctgcagtgcgtatagaccatcccatagaggaagtgaaagaggactagtgtggtggaagaaaggagtggcaggaaatgtggttaaagagattggtgggagggggtggtggggacaacaggcagatcactcagtctcatagtccaatataaggagtttggattttgtgtaactgcaatagaaccagaagaacattttaaacagaggaacaatattatctcattatctcattctaacacttaagaccctagtaatatgctcacatgtttctgcaaaatacacaaaagaaagctatttttgcatgatttttctttgaggacccctacaacttgcatcaacttcaggtcccgtattacccaactccatctctgaactgggtaagggctatgttagaggtaagcacaggtgccaagggaaaagcaaccttgccaatttggtaccaagagttctttactgtcaaaatggattttcttcctctttagttcacattgtctgataacgttcaaaattgtgccctggtctaatcacagaaatcatgaaagcaacagaattctttctgctggtagcccaagatagggaacattttgcttgaggaacactctcagaagtgaaagatgaagatgtgtacagctttccctctcattagtgctatgaaacacagggaaacagtccctgtttgtcttgggcagcctacacaaagatgcctcctattgtaacacagcaatgagtcatagaggtagatgcagatggtacaaaaaaccaaactagggagagttgattgtccagaagcaaaggcaccttaacacataatctaccaccatgaatgaaaatcaccttccagtttcctttggtccaacacttaggcagtaacaaaggcaccagcagccaacagctttggaagtttactatgtactacctcatttaatcttcacaactatgctaagtaggttctatcattagccccatttttgcagatgaaaaaaactaaacctaagccttagactaaaagacttgaaccaggtcacaaaaccacaacagaggccgggctgtaatcccagcactttaggaggctgaggtgggaggatcacgaggtcaggagtttgagaccagcctgaccaacagggtaaaaccctgtctctattaaaatacaaaaattagccaggcacggttgcacgtgcctgtagtctcagctagttaggaggctgaggcaggagaatcgcttgaagccgggaggtggaggttgtggtgagccgagatcgcaccactgcactctggcctgggcaacagagcgagactgtcaaaaaaaaaaaaaaaaaaaaaaaaccacaacagagctaggcttcaaacttagcctgactccagagcccttaccttttaaccactgtttagactctcccagtaccatccaaatttttctgccaccaaatctggggtagtttcttctcatcctgcttttactgttttaatgaaattcctcctccttgagagaatacagttgtggtatcacgattacaacagaatgataacaggtacttctactcagtatccacttccaaatcaaataggaaaggataatgaggccataacactcagccagaatccactgtggtcaaaacttgtcctaacaacagtcatgactttcagtctattttaagagggtgaaacactgtatactaaaactgaacaaatgggctgggcacggtggctcatgcctgtaatcccagcattttcggaggccgaggcaggtggatcacctgaggacgggagtttgccaccagcctgaacaacttggagaaaccccatctctactaaaaatacaaaattagccgggcatggtggcgcatgcctgtaatcccagctactcgggaggctgaggcaggagagtcgcttgaacccgggaggcagaggctgcagttagccaagatcgcaccattgcactccagcctgggcaacaagagtgaaactccgactcaaaaaaaaaaaaaaaaaaagaacaaatgtttgcaatgcaataatgcaatccaactacctatacaagtcagtattatgcaaaatagaccccacaggattgagaggggactaaagaagagagtctgttgggagcaggtctgaaaaacacagctgaacacacaccacaggtccaccatcgaccttgtgatcattacagggatggaacaagtcatcaagccaacaggtccccgggttattaaaatctagagaaagttggctgggcatagtggctcatgcctgtaatcccagcactttgggaggatcgctagagtccaggagttcaagaccagcctaagcaatatagcaagaccccatctgtataaaagtttaaaaaataaaattttctaaaaatctagagaaaggaagggaggttacagaaatcaccaaagagcataaggtccaagcctattctgatttcatcaattagcttcctaaagtctgcagtgtgcaggtaaaagattaagaacccaatccttattgaaggttgggcaaacaacaaccaaaaaaaggcaaaaaaataataataacctaatcttttctggctatttctctagctagctaagcagctttccctcacatagtcttgtcccttacctagaacccaagagagttgtgggagctcagaaacccccaggaaacagactcatgattatttaatgaaataaagtgctcgtttgtaagcaacgctggaagctgcagagatggagcacctagcatgtggtttctaggtcatggtgttcatgcctcaggtcaggagtttaggggctcctggtgaagtacggaaagctaggaaatcattagtgagaaaatggtttgttcaatgaatgaatgaagagtaggatgaagaagaaagccgctttcttgagcaatttcccaggaaggccaagtaccaggaacctccaaagtcagcaaggaaaagccacgaagtccacacggacttccagcacgcccccgctggccaggcagttggcctgcaacaaggcactcaggccccacaggtgtcaggcatgaaggtgaggatgatgctccacacttaataccctgagctggtctcaaaagcacagatgcgatcttaattctttccaaaacattagcctcctctccccgttacaggccagactcccagatgatcacatttagaacagaactgggaggaggcaggggagacgtgctagcttttattttcttgggagaagactgtacagtggccaggaaccactaaaacggtcgggaaaaggggtacagagaggaatggagacccgcgggatccgctaactggtctgagtcaggaacacaatcagtgcttagtcaccgatacctcggcggccgggagtttctcgccccctgccagccccagacgtacgtgacaaaccagatcggagcctggcgcgcgctcctgctccccggctcgggcctccccagccgggccccgaggttcaccgcccgccccatacttactccgcagagctggtcccgttaactgcagagccgtcgggggccgggttcagctggatgggcgtcggcttcttcttgggcattttggacccgggtaacgcgcttccaactccggggggagggcagcacctctcgcttcctcccgctgcgctgccccgcgcccgctgcgcaggaccaagtccgggccgcgggccccggggctgccttcagcgggtgcgccccgcgcggtcccgtcagcgccgaggggccggtagcggtctcagtggacccccgccccacccgcccgggactcggcttcgcgcgcagagagccgaaaggctgccctgcaggagcggagcgggctgaacgtgcggttcggcagcccgggattcccttcctctctctctctcaaccaaccagtccctccggctcgggcggcacagccgcgcgcgcaccagagcccagctccagctcctgccggggaaagtgccgccgccgccgtgctcctagccgctctgcgaagcggccctgggagggactggaggccgggggaggggcggggaaggggaagcctcgcctcccacccgggatgcggcgctttccacactcccactcggctccgcccctattgcctcgcagacaaccaatgggggcaagcctcggcggcagatgacgcggaaatacgtcacgggagcgcggcgcactgcctgggggcggggtccgtcgcggacgccgtggcgccctctgtcgccccgaggcaagcaggtggacccagctgagaagaagtctgtgtcgctgtgtggtgagctctccaggccaggtgccgcgcggcctccacctctgcggtaaccggcctgcccccgacccctgtccccaagccgagccgtgttgacgaaaatgaaataacaaaataaataaggaaaaggaccccttcctgtgtccagaggagaggcagcgtggggaataggaaacttgtcgagaggctcctttgagcccaacaaactgacgcatataaattttgtttgtttaatggtaatactactgagaagggtgcaaggaaatggatactcagtgctgatgagattgtaaattgttgcgacagtttttgagagcagattgatgatttttttttttttagacttgggaacttttttttttttaagacggtgtctccctcagttgcccagcctggagtgtagtggcgcgatctccgctaactaccacctctgcctcccacgttcaagcgattctcctgcctcagtctcctgagtagctgggattacaggcactcgccgtcatgcccggatcctttttgtatttttgtagaaacgggttttcaccatgttggcaatatttttttaaagccttaaaaacactctttcgggccaggagcggtggctcacgcctgtaatcccaattttgggaggcccaggcaagaggatcacttgagcccaggagttcgagactagcctgggcaacatagtgagtcccccgtctctattagctgggcatggttgtgtgcagctgtcgtccaagctactgaggaggctgaggctggaggatcacttgagcccaggagtttgaggctgcagtgagctatgatcacaccactgcacaccagccagggctacagagcaagactccctttaaaaaaactttcatccaggccaggcgcggtggctcacgcctgtaattccagaactttgggaggccgagacgggtggatcacgaggtcaggagttcaagaccagcctggccaagatggtgaaacccatctctactaaaaatacaaaaaattagctgggcgtggtggcgggtgcctgtaatcccaactacttggggggctgaggcagagaattgcttgaactcgggaggcggaggttgcagtgatccaagatcacaccactgcactccagcctgggcgacagagtgagaccccgtctcaaaaaaaaaaagaactttaatccaaaaattccaattctgtgaattactaaagaaataagatgtgaataaagagcttaataagaggcacaatacccatttaaaagtgcacattcagtgttcctcttcccctttcccatcctaaaatactaagtgtcaaagacattaggtgtacagaacaaaggaaacgtgtacagaacaaaggaaacatctacacctggttatccacagccaggtgttggtgacctagcaggtaaggaggctgaggaacctgagaaaatgaagagggcttgaacacctgggaggcagtcctacacaaagtcttagccgtagggcccaagaggggagaacaaggcatccaagtggggaaggcctagaagcttagatgggaggttagttgcattcaggatggttgattaagtcactaaatatattaagcatgacagagccagctttctcactgtggtagaatgacgttagaagtatgggaacgcagaggcctcccaaagtgctgggtttacaggcgtgagccactgcgcccggcctgaactcatagttttttaaaaaataaattattctgggtggatgcagtggcggctaccacctgtaatcccagcactttgtgaggccaaagctggaagatcacttgaggtcaggacttcaagatcagcctggccaacatggtgaaaccccgtctctactaaattacaaaaattagccaggcatggtggtgggcacctgtaatcccagctactcaggaggctgaggcaggataattgcctgaaccagggaggcagagtttgcagtgagccgagattgcaccactgcactccagcctgggcaacagagcaagactctgtctcaaaaataaataaaataggccgggcgcggtggctcatgcctgtaatcccagcactttgggaggctgaggtgggcagatcacgaggtcaggaaatcgagaccatcctggctaacacggtgaaaccccatctctactaaaaaatacaaaaaattagccgggcgtggtggtgggtgcctgtagtcccagctactcaggaggctgaggcaggagaatggtgtgaacccgggaggtggagcttgcagtgagccgagatcgcgccactgcactccagcctgggcgacagaacaagactccgtctcaaaaataaataaataaattaaataaataaaaataaattttattgtgtatatttgaggtttgtaacatgatgttatgggatatatatagatagtaaaatggttactatagtgaagtgaattaacatatctataccgtcacataaaggcttgtgtaaagtatgacgagcagctaaaatctacttatttaacaaaaaacgcaaataaaatacaatgttattaactatggtcttcatgttgtacattagatctctagacttcttcatcctacatatctgctgctttatattctttgacctacatctccccatttctttcccccatactttttaatatagaggcatagatgtaaatgtatgcatgtgtgtgtagaagtgtgtccttattcatgttaaacatgcataatttttagtatcagagtaaaataataaacattaaaaagtgaattgaaggccaggtgtggtggtggctcacacctttaatcccagcactttgggaggctgaggtgggaggatcacctgaggtcaggagttcaagaccaagcctggccaacatggtgaaaccctgtctttactaaaaatacaaaaattatctgaatgtggtggcgggtgcctgtagtcccagctacttgggaggctgaagctggagaatcacttgaacccaggaggtggaggttacagtgagccaagatcactccactgtactccagcctgtgcaacacagtgagactatctcaaaaaaaaaaaaaaaattgaaacttttcaaagtaatctattatcaaggcagtctatctgaattctggtataattttatatttactagttcaaataaaaactattaggactttgagcaattaattgaaattttcaaggcctcacttccactctgtgtaaaatgcagcattctttttaatattgaaatattatgattctatgcatgctgggttggcctccactgagtaaaccctaagcccttatcatgatccaagaagcccagataaacaattaccccaatggttaaagtttgcagaatagttcaaggtaggagaatttgttttcctcatttccttttcagaccggcagtgatccatcggttctgtcaacttttcctgagggcctaacataagtgctgaccatacagacaagaataagactgaactatatgtgtatgaatcagtgatgtataataataaacactgtaacatatatatttggttgaaccatatcaggttgctctatttgtaggtcaaaaatgtttgaatattggcaaatactggttcatcccatttgtacacagtgtagctagatcacaaatgtgaagatccaagaaatacaggccaggtgtggtggctcactcctgtcactcccgtaatcccagcactttggaaggctgaggcaggtggatgacttgagcccaggagttcaacactagcctgggcaatatgacgaaaccccatctctacaaaaaatacaaatattagacaggcatagtggcacatgcctgcagtcccagctactctggaggctgaggtgggatgatcgcttgagccgaagtcaaggctgcagtgagccatgatcttgcacaccagcctggaaaacagaagaaatacaaggacaaccagtgatgaaaacatatcaagaattgaggagtacatttaactcagacctctatatcttaggttcaaaatcaaacaaaacaaaaaagcatcaacttgagagagaaagacctgagattaattccagttctgcccttggctgattacttaccctctctgagcatcagttaatttacctataaaatgagaattatactgtctactactgcactaaatagttatgagcattaaatgaaactttgaaagaatagtgcctaacayacaggagctaaataaatggtgatggtgataggttttcatcatgtaaacataatctgctagaagaataatttttttttttgagacagagtttcactcatcgcccaggtggagtgcagtggtgcaatctcggctcactgccacctctgccttccaggttcaagcggttctcctgcctcagcctcccaagtagctgggattacaggcacccgccaccatgctcagctaattttttgtatttttagtagagacagggtttcgccatgttgggcaggctggtcttgaactcctgacctgaggtgatccacccacctcggcctcccaaagtggtgggattacaggtgtgagccaccgtgcccggccaaaggagaataatttatagaggctttcctggagacaatttcttcttcagaaatattcacacactttgattcagtaattctacttccatgattctcttgtaaagaaattatgaaagctatacagaagaatgatcaacatagtattatttaaatagctaaaatctgaaattacctaaatattcaacagaagagaaatgattacatcatttatgacacacccatatgatgaaatactggacaagaaaagactttcatttctagaaatttcaaacagtaggaattaatattttttaacagtacttctagaaaaacctaggatctctattcttttttttaaattttttccagatggagacttgctctgtcacctgggctggagtgccgtggcgcaattggggctcactgcaacctacgcctcccaggttcaagcaatttgcctgcctcagcctcctgagtagctgacattacaggcgcccgccaccacgctcggctaatttttttgtatttttagtagagacagggtttcgccatgttgggcaggctggtcttgaactcctgacctcaggtgatccacccacctcagcctcccaaagtgccgggattacaggtgtgagccaccgtgcccggccgaaggagaataatttatagaggctttcctggagacaatttcttcttcagaaatattcacacactttgattcagtaattccacttccatgactctcttgtaaagaaattatgaaagctatacagaagaatgatcaacatagtattatttaaataggtaaaatctgaaattacctaaatattcaacagaagagaaatgattacatcatttatgacacacccgtatgattaaatactggacaagaaaagactttcatttctagaaatttcaaacagtagggattaatattttttaacagtacttctagaaaaacctaggatctctatttttttaattttttccagatggagtcttgctctgtcgcctgggctggagtgcagtggtgcaattggggctcactgcaacctacgcctcccaggttcaagcaatttgcctgcctcagcctcctgagtagctggcattacaggcacccgccaccacgcccagctaatgtttgtatttttagtacagatggggtttcaccatgttggtcaggctggtctctaactcctgacctcaggtgattcacccacctcggcctcccaaagtgctgggattacaggcatgagccaccgcgcctggcccagatctctattgttttgtcataaacagaaaaaacgtaacgtctatatcaacacccaaaggcaaatgaaagtagagtgagatagcactggacacaactatttttggtaaaaaccaatagaacataataggtatctgggaaatggccaggactttcaatgtcatggagtatttagttaaggaaacagggacaactacctggccatttgaaaaagaaatgaaggtgtaggggccgggcgcagtggctcacgcctgtaatcccagcactttgggaggccgaggtggggtggatcacgaggtcaggagatcgaaaccatcctggctaacacggtgaaacaccaccgtctctactaaaaatacaaaaaattagccgggcgcagtggtgggcgcctgtagtcccagctactcaggaggctgaggtaggagaatggcgtgagcctgagaggcggaggttgcagtgagcccagatagcgccactgcactccagcctgggtgacagagcgagactccgtctcaaaaaaaaaaaaaaaaaraaagaaagaaagaaaagaaatgaaggtgtatccctactttttatcctataataaattccaggtcctttgccgtgtgtactgcgagagtgaagaccattctcattaatcagactgtcgacattccagaaaatgtcaacattactctgaagggacacacagttatcgtgaatggccccagaggaaccctgcggagggacttcaatcacatcaatgtagaactcagtcttcttggaaagaaaaaaaaagaggctctggttgacaaatggtggggtaacagaaaagaactggctaccgttcggactatttgtagtcatgtacagaacatgatcaagggtgttacactgggcttccgttacaagatgaggtctgtgtatgcttacttccccatcatcgtcgttatcccggagaatgggtctgttgttgaaatccgaaatttcttgggtgaaaaatacatccgcagggtgcggatgagaccaggtgttgcttgttcagtatctcaagcccagaaagatgaattaatctttgaaggaaatgacattgagcttgtttcaaattcagcggctttgattcagcaagccacaacagtttaaaacaaggatatcaggaaatttttgaatggtatctatgtctctgaaaaaggaactgttcagcaggatgatgaataagatytaagagttatccagctacagaaagaagacgccagatgactcctaagacctacttgtgatatttaaatgatgtaataaaagacctgttgatttggagaaaagtaaatagctaaataaattccaggtgcatcaaagatgcaatcaaggccaggcacagtggctcatgcctgtgattccagcattttgggaggcagaggcgggacaattgcttaacgccaggagtttgagaccagcctgagcaatatgggaagactccatctctacaaaaaaaaaaactttgtgcayggcggctcatgcctgtaacctaacactttgggagaccaagacgagagaattgcctgaggccaggagtttaagaccagcctagtcaacatagtgagacccccatttcttaagaaaatatttttaataaaattaacaaaagataaacttagccaggcatggtggtacatccctgtagtcccagctacttgagaggctgaggtgggaagattacttaggccccggaggtccaggttagagtgagtcatgatcaaactactgcactctagcctggacaatagagtgagaccctgtctcaaaaaaaaaaatatggaagaaaagaataaagaaagaaaggtgaaatcatacaagtactgctagagaagctagataagatcatgggaaatttttttttttattttggaatgagaaaaacatttgaagaaagacacaaactgtcaaaaccatwaaggcaaagattaataaaattaacctcacaaagatttaacatttctccatggagaaaaaacaccttgtacagagatataagtacacaaatggtaagctgagaaaataaacatttacaatatctgcaatataataaaagtctaatttctttaatataattaagagcaatcggctgggcgcggtggctcacacctgtaatcccagcactttgggaggccaaggaaggcagatcacgaggtcaggagatggagacaagcctggccaacatggtgaaaccccgtctctactaaaaatacaaaaatttggccgggtgcggtggctcacgcctataatcccagcactttgggaagcctaggtgggcggatcacgaggtcaggagttcaagaccaccctggccaacacagtgaaaccctgtctctactaaaaatacaaaaattagccggacatggttgcatacacctgtaatcccagctactcaggaggctgaggcaggagaattacttgaacctgggaggcagaggttgtggtgagctatcacaccactgcactccagcctgggtgactgagtgagactttgtttaaaaaaaaaaaattagctgggcatggtggtgtgcacctgtaatcccagctacttgggagactgaggcaagagaattgcttgaacccaggagacagaggttgcagtgagccaaatcgtgcaattgcactcctgctggggcaacagagcgagactccgtctcaagaaaaaaaaaaagaaaaaattagtcgggtgtaatgacatgtgcctgtagtccctgctactcgggagtctgaggcaggagaactggttgagcccaggagggagaggttgcagtgagccgagattgygccactgcaatccagcactccagcctgggcaacagagcgagactccaagttaaaaaacaaaacaaacaaaaaaaaacccaggcgctgtggctcacgcctgtaatcccaacactttgggaggccaagatgggtggatcacaaggtcaggagttcgagaccagcctggccaatatggtgaaaccccatctctactaaaaatacaaaaattagttgggcgtggtggcacgcgcctgtagtcccagctgctcaggaggctgaggcaggagaatcacttgaacccaagaggcggaggttgcagtgagccaagatggcgccactgcactccagcctaggtgacagagcaagaatgtctcaaaaaataaaaataaaagaaaaagagcaattacaaattaaaagaagatcatcattcatccaatagaaacataaggaaagtattaatacatcaatataggtagttcacagataaagtcatacaaatggctttcaaaattctactcgcttagagaaatgcaaattatgagagatcacctttcacttatcaatattattgaacatatgggagaaaaggcattctcatacactattgctgggagtataattgctgcactctcttttttttttttttttttttgagagggagtcttgctctgttgcccaggctggagtgcagtagcctggtctcggctcactgcaacctccacctcacgggttcaagcgattctcctgcctcagccttctgagtaactggtattacaggtgcccaccaccatgcctggctaatttttgtatgttagtagagatggggtttcaccattttggccaggttggtctcaaactcctgacctcaagtgatccaccagtcttggcctcccaaagtgttgggattacaggcgtaagccaccgtgcccagctgctgcaatctctttaaagggcattttggcaataactgtttaaagtcccaatactgacccagcattgcataatttttccttagaaattatcagacctggggctgggcacggtggctcatgcctgtaatcccagcactttgggaggccagagtgggggggtcacttgaggtcaggagttcaagacagcctggccaacatgatgaaacctcatctctactaaaaatacaaaaaatwagccaggcttggtggtagacgcctgtaatcccatctactcaggaggctgaggcaggagaatcgcttgaacctgggaggcagaggttgcggtgagccgagaccacatcatggcactccagcctgggaaacgagcaaaaccccgtctcaaaaacaaaaacaaaaaaaaagaaaaaaattattagacatatataccaaaaaacctttttctacatacatgattactgcagcattatttaaaacagaaaaaaagaaactggaatctgtctgtcaaaaggagagtaaattatgacatacaaataaatcatgacacatttatacaaagaartactatacagtacggtcattccaaagaatgaggcagacatatttatgctggtatagaaagatcttcaaaatgtatgatgtgaaacaaaataaatggagcagaacattgtgtagtaactatttgttagaaaaacaaaaaaaaggatatatttggttttgtgggttttggttttgttttgggacaaggcctcactccatttccagtgcaaaggctggatcatagatcactttaaccttgaactcctgggatcagtgatcctcttgccttagcctccccaatagctaggactacaggcgtgcgccgccgtgactggctaatttttttattttttgtaaagacagtgtatccgtatgttgcctaggttgatcttgaactccttgcctcaagtgatctcccacttaaacctcccaaagtgctgggactacaggcatgaacacctggacaagaatatatttgtatatgtgcttttatatgaaagaaaatttccgtaagcacaaaagagcaattgttaatagtgtttgtctccggggaggaactctgagaagcctggaggcagattaagtttccttttcattttgcagcctttggtactagtagagacggggtttcaccattttggccaggttggtctcaaactcctgacctcaagtgatccaccagtcttggcctcccaaagtgttgggattacaggtataagccaccgcgcccagctgctgcaatctctttaaagggcttttgaaatatatatatatatatatatatatatataacttttccaattaaaaacaacattaggctgggcgtcgtggctcatgcctgtaatctcagcactttgggaggccgaggtgggcagatcgcttgagctcaggagttcaagacccacctgggccacatagcaagacccttgtctctaaataaataaataaacaaaaacagagtgaaaaagaaagaagacatttgcaatgaatatattttttaagaggaggggtcttactgtgttacccaggctaaagtgtagtagctattcacaagcacaatcatagtgcactgccacctgaaactcctggcctcaagcgatcttctcacctcagcctcctgagtagctgggattatggacatgcaccactgcacctggctcatataatgcatatatccaaaaacacccacaaacctcatatccagaatatatgaagaacccctacgcattaacacaaaaagagatagacaatccaattaaaaaaccaaaaaaaatgggcaaagccagacacagtggctcaggcctgtaatcccagcacttggtggaggcccagaagggcagatcacttgaggtcaggagttcgagaccatcctggccaacatggtgaaaccctgtctctacaaaaaagttggccaggcgcagtggctcacacctgtaatcccagcactttgggaggacaaggcaggcggatcacctgaggtcaggagttggaaaccagcctgggcaatatggtgaaaccccgtctctactaaaaatacaaaaaaattagctgggcgtggtggcaggcacctgtaatcccagctacttggaagggtgaggcaggaaaatcgcttgaacctgggaggtagaggttgcggtgatccgagacggcaccattgcactccagcctgggcaacaagaacgaaactccatctcaaaacaaaaacaaaaacaaacaaacaaaaaaaattagccgaggatggtggcatgcactacttgggaggctgaggcaggagaatcacttgaacctgggaagcagaggttgcagtgagcgaagatcaagccactgcctccagcctgggtgacagagtgagaccctgtctcaaaataaataaatacacttttaaaaatgggcaaaacacttgaacaggaacttcacaagggaagatatccaaatagtcgataaatatatgaaaagatgctgaaattccttagttatggggaaatgcaaattaaaaccgcagtgtaagtacctaatgctactgaattgtaaacttaaaaatgatttaagctgggcacagtgtgaggggatcatacttctgtagtcccagctactctggargctaagataggaggattcctggtacccagaagttcaaggctagcctgggcaacatagcaagatcctgtctcttaaaaaaaattaaaacaatctaaatagtaaatgttttattatgtatattttaccacaatttaagaacacacagtgtgatactacgtccactattctggctaaattgaaaaaagacaagctgggcatggcagctcatgcctgtaaactcagcactttgggaaggcgagtcaaaagggtcgcttgagcccaggagttcaagaccagcctggacaacatagggcgaccctgtctctrcaaaagatttaaaaattagccaggtgtaatggtacatgcctgtggtcccagctactcaggaggctgaggtaagaggatcagttgcacccagtagttggaggctgcagtgagccatgatcctactattgcactccactctaccctgagtgacagagcaagactctgtctcaaaaaaccaaattaattaattaataaaaaaagaaaaagacaatatcaaatgttgataatgatgtggaactattatgacttccttacactgatggtgagagtatatttgtgtaaccagtttggaaaactggcgatatcttctaagatttaacatcttccctgtgacccaaaatatacatgactgtatattttatttctttttcttttcctttttttttttttttgagacggagtctcgctctgtcgcccaggctggagtgcagtggtgcgatctcagctcactgcaagctccgcctcccgggttcatgccattctgctgcctcggcctcccgagtagctgggactacaggcgcccgccaccacrcctggctaattttttgtatttttagtagagacggtgtttcaccgtgttagccaggatggtctcaatctcctgacctcgtgatcctcccgcctcagcctcccaaagtgctgggattacaggcgtgagccactgcgcccggccatgactgtgtattttatttcgatatacagtcatgtattgcataatgatgggaatatgtcctgagaaatgtgtcattaggcgatttcatcattgagcaaacaacatagagtatacttacacaaacctagatagtgtaacctactacacacctaggctacatgatacagcctattgctcctaggctacaaacctatatgttacattactgtactgaatagtgtaggcagttgcagcacaatgatatttctgtatctaaacatagaaaagctacattaaaatttggtattacaatcttttttttttttccccaagacggggtcttgctctgtcacccaggctggaatgcagtggcatgatctcagctcactgcaacctccgcctytcaggttcaagcaattctcctgcctcagcctcccaagtagctgggattacaggcccccgcccccacacctggctaatttttgtattcttagtagagacagagttcaccatgttggccgggctggtctcaaactcttgacctcgtgatccgcctgccttggcatcccaaagtgctgggattacaggcgtgagccacaggtcccggccctattattgtactcttatgggaccatcatcatatatgtgggctgtggttgaccaaaacgtttttatgtgatgtgtggctatatatgttcaccaaaaatcatttacaagaaagtttatggcagcattatttgtaatagttattggggaaacaacccaagtttcagtaaatggataaattgtgataaattcacacaatggaatactccatagcattgtaaaaatggactactacttgcaacaatatgcgtaaatctcacaaacatcctgttgagtagaagctagacacaagaaagtaatattatttttttctttcatataaagttcaaaacctggcaaacctagtctatggtggtagaagttgggatagtggttatccttgaggaagagagtgaggaaggtgagatgaagggggctttctgggtgctggcaacctctgctttcttgatctgggtgctggttacacagtgtgttccattcatgacttgtgtacttttctgtctgtatgttacccttcagtaaaacaattaccaactaggcacagtggcttatgcctgtaatcccaacactttgggaggcaaaggtgggtggatcgcttgagctcgggagttcaaaaccagcctgggcaatatagtgagaacctctctctataaaaaatacaaaaattagctaggcatgatggcaagtgcctgtagtcccacctactcaggagcctgaggtgagagaattgcttgagctggggagattgaggttgcagtgagctatgagcatgccatggcaccccagcctgggcaaaagaaacaattaccaggccaggcacggtggctcacgcctgtaatcccagcactttgggaggctgaggcgggcggatcacgaagtcaggagatcgagaccattctggccaacacggtgaaaccccgtctccactaaaaaattcaaaaaaaaattagccaggcatggtggcgggtgcctgtagtcccagctactcaggaggctgaggcaggagaatggcctgaacctgggaggcagagcttgcagtgagccgagatcgcgccactgcactccagcctgggcaacagagtgagactccatctccaaaaaaaaaaaagaaacaattaccagagaaaagaaaaataaataaactcatggaaaaactttttttttcccagaaaataaagcagactgacccaaatatatttttatttgtcctcttttgctttttaggttgaaaaaaatgatataggcctttctcacattaaaacacttacgtcttctgagaattttgtgggttttgctccaaatttttctgttttttaaattatataacaaatactaccttattagttgaggggagggagaccagaaaagtatacaacaggtagtagaaagcttgatacacttacactttttttttttttttgagagtttccctctgttgcccagcctgcagtgcaatggcgagatctcagctcactgcaacctctgcctcctgggctcaagtgattctcatgcctcagccttccgagtagctggtattaccagcatgtgccaccacacctggctaatttttgtatttttagtagagacgaggtttcaccatgttggccaggctggtctcgaactcctggcctcaagtgatccatatgccttggcctcccaaagtgctgggattacacgtgtgagccaccgcgcctggccttgcttgatacactttcatccatattcacgtgcagttgatattataggatcagtgaggtttatgatattatcagttgaacagttttattttagtggcaagtccatatttgcttccttacaaattaagatcttttattcttttattatgaaaagttcagttggaaaattcaaaataaaaaaaacttgctcattgcacacggaagttatttcacatgaagaaattccaccttactttttttcttattttaataccacatttttctatactttaatcctgagagaactctggctctatatcaattgcttttaaatccattgtctggatttttaagctcctgtgagtttggcagctgttcctattgagtaactgagtaaagagttacagtgcaaagagtgatattactatcccctctgcaccccgccccatgcccctgctggccctcctcccctccagccccccaccaaggacatccgcttccttggttcttcacgtccgacattctgaatgcaatgaaaccactaggttattttgagagccacttttaatggtctcttgccctttaattaaagraaaagatgcctcaacaaggtgaaagatgatgcaatttcaattgctctctaaggatgtggcttaaaccatacaggatgtcagatccagcacctgttttttggtgggagtcagggtagggacctcgttctggcttggcagacgtggtactgtggtattttgctttttacccttggatagcgcagtgaaagaagatatactcaggacataccagcttcctcgagggcagctgtggagaaggaagtcgtgacttcctttgaaatcacagtccagaatcccggatattcttattttcaagtctggtttgagagtaaacaaatctcaaatctctttcccaggrcattcattcaaatacatgtcataattggggttttttgttgttgtttgtttttccctcatgctttcttccactcaatggaaaacccctgcatcatccgtttcctgccaagtgctttgcaaagattacaagcaggaaatttaaaatgagaatgaccatttgagctacagtgatcaggcaactatgataataagaggatgtgggacctatacagcagagccattataaagtttatcggtgtttttataattcccycttgctcaggggcaggtcaaattatagagagctgagaatttgcatgaaaaggtttcatctccaacaatgaactatgcatggcatatagtcatgagttcgtgtatattttaagatattgtaaggccgggcgtggtggctcacgcctgtaatcccagcactttgggaggctgaggcgggtggatcacgagatgtggagatcgagaccatcctggctaacatggtgaaaccccgtctctactaaaaatacaaaaaattagccgggcatggtggcaggcgcctgtagtcccagctactcgggaggctgaggcaggagaatggcgtgaacccgggaggcggagcttgcagtgagccaagatggcaccatccagcctgggcgacagagcgagactctgtctcaaaaaaaaaaaaaaaaaaaratattgtgaactattattattggtacattcatgcattttgtactttatttatatactcccagggagcaaggaatctcttctgtgcaatgtgccagattgctttaattgtacagcctcataaaatataaacttgttattataatgataacattgttgtgtcattatgattaccgctgaaccatgcagctatttatccttgctcccctctatgctttctctaaatagatagacctttgtaactggatcctagactggcacctgagatgcggcttttgcatttaaagagtgggagactgaattcatcttagaattttagagccgaattttagaggtcctggtgttcaggcagcccactttataaataggaaaactcagcttcagagagttcagtgatgtcctccaaggtcgcacagctagttagggttagaacagggacatcatctgattgccagacccatgatcttttaaaaagtctctggtatcttgccaaagagtagataggtaaaattagttttatcgattgttagtaggtttgtttggctaggacattttcaaatatctctaattaaacgtcttgattatgccaaaaaacaataatatgattatttttcctttgtctatcatacctttctccagttttgatactcaccttcaatttcaagttatagcaagccatattttgcataaattcaatatatttggatatatcataatccatacttcttttgagttctatggatttggggcctaacacagaaactggcaaatctaggtgccattcaaacttagtttatagactatatttttattttgtttatttatttgagacagggtcttactctgtcacccaggctgaagaacagtagcacgatcatggctcactacagcctgtaactcccaggctcaagtctcagcctggaactccttttgtctcagcctcccaagcagctgggactacaggtgtgtgataccatacccagcgcttttttttttttttgtaaagatgaggtcttgctatgttgcctaggctcgtctcaaactcctgaactcaagtgatcctccctccttggcctcccaaagtgctgggattataggcatgagccactgtgcccagtctatagactatttttttaaaaagcaatttcctataatgcccatgatgtatatagtccaaatttagaaatttattttagggaaataatccaagatgtacaaagatttaggctgggcgtagggtctcacgcctgcaatctcagcactttgggaagccgaggcaggcagatcacaaggtcaggggttcgagaccagcctggccaacatagtgaaacctcatctctactaaaaatacaaaaattagtcagccatggtggcgcgcacctgtagtcccagctactcaggaggctgaggcaggagaattgcttgaacccgggagacagaggttgtgtgagccgagatcacgccactgcactgcagcctaggcagcagagcaagactctgaatcaaaaaaaaaaaaaaaaaaacaaagatttatgtataacagggacatttggttcagcattactcataataacaaaatagcaacacaaagtaatgtcctttttttttcttggaaaaaaaacataaaaaattgtttacagtgattatatttagaaagacttgctagccaagtgtggtggctcatgtctgtaatcccagcactttgggaggccgaggcaggcagatcacgaggtcaagatttcaagacaagcctggacaacatagtgaaatcccatctctactaaaaatacaaaagttagccaagtgtggtggtgggtgcctgtagttccagctacttcggaggctgaggcaggagaaacgcttgaacccaggagtcagaggttgcagtgagccgagatcatgccactgcactccagcctgggtgacacagcgagactccatctcaaaaaaaaaaagacagacttgctcaatgggaagaaaatctttccttttgctttttgtgtctgttgtttgtatcatttgatttttctgtccacatagatgtactaatttattttcttcaaaaacatcaacagatatatatctatagatatagatatagatatatagatagatatagatatagatacagatatagatatagatatagatatagatatagatatagatatagatatagatatagatttttttttgagacagagtcttgctctgttgcccaggctggagtgcagtggcgcgatcttggttcattgcaacctctgcatccccattttgagcgattctcctgcctcagcctcctaagtagctggaattacaggtgctcaccagcacgtatgtctaattttgtatttttagtagagacggtgtttcgtcatgttgaccaggctggtctcaaactcctgacctcgagtgatcacctgccttggcctcccaaagtggtgggattacaggtatgagccaccatgcccagccaatgggcttccaattttattactgttgccctggatttctctccctgcattttggacacacatagtccactgcttccttggaatttcttttctttttctttttttctttctttctttcttttttttttttttttgagatggagtcttactttgttgcccaggctagagtgcaatggtgcattctcagctgactgcaacctccgcctcctgggttcaagcaattctcctgccccggcctcccaaggagctgggactacaggcrcaagccaccacacctggctaattttttttttttttttttttgtatatttagtagagacaaggtttcactgtgttagccaggataatctcgatctcctgacctcgtgatcctcctgactcggcctcccaaagtgctggaattacaggcatgagccactgcacccagcttaatgtgctttattttttgagacagaatttcactctgttgcccaggctagagtacagtggcacaatctcgtctcactgcaacctctgcctcccagattcaagcaatcctcttgtctcagcctcccgagtagctgggactacaggcgcccgccaccatgcccagctaatttttgcatttttagtagagacagggtttcaccatgttggccaggctggtctcgaactcttgacttcatgatctgcccgcctcggcctcccaaagtgctaggattacaggtgtgagccactgcgcccggccaacccccagtttttttttttgggagggactctaactctcctaaattgggtctctaactcaattctgccttttacctgggataaaatatactccaccacttaacaagaggtgggcaattcatgctgcagtatatttcttttgggtagggtgattctccaatattgtccctttgtggtcgccaggaagagattactggaacatagtcttaatttagaccccaagagagggtttttggatcttgtgcaagaaggaatttggggcaagtccacagagtaaagtgaaagcaagtttattaagaaagtaaaaaaagtaaactaatatgcagagcaggctgggcgcggtggctcacacctgtaatcccagcactttgggaggctgaggcgggcagatcacgaggtcaggagttcgagaccagcctgaccaacagggtgaaaccccgtctttactaaaaatacaaaaattagccgggcatggtgccacgcacctgtaatcccagctactcaggaggctgaggcaagagaattgcttgaacccaggaggcagaggttgcagtgagccgagatcgtgccactgcactccaacctgggcgacagagctaaactccgtctcaacagaaaaaacaaaaaaaacaatatgcagagcagcagcttgggctgcttaactgagtatatttatggttatttattgattatatactaaacgggtggattaaacatgaggttcctgggaaaggggcaggcaattcccagaatggagggttcctcccctttttagactatatagggtaacttccagacattttcatggcatttgtaaactgtcctggcactggtgggagtgtcttttagcatgttaatgtattagaatgtattatgtattatgtattatgtataatgtattatgagcagtgaggacaaccagaggtcactttcgccaccatcttgattttggtgggttttggctggcttttgttaccatatcctgttttaccagcaggtctttgtgacctgtctcttgcaataccagtcctgttgacctcttatctcattttgagacaaagaatgcctaacctcctgggaatgcagcccaacgggtctcatcctcattttacttcagctcttattcaagacacagttgctctggttcaaatgcctttttctccaattatatttctttcttttctttctttttctttttcttttttttttttttttttttttgagatggagtttcactcttgtcacccaggctggaatgcagtgacgtgatctcagctcactgcaacttctccctctcgggttcaagcaattctcctgcctcagcctcctaagtagctgggattacaggcgcctgccaccacacccagctaatttttgtattttagtagagacgaggtttcaccatgttagtcaggctagtctygaactcctggcctcaggtgatctgcctgcctcggcctcccaaagtgctgggattagaagtgtgagcctccaattacatttctacatgcctctccatactttgttgaacccaagcataaaaatattttgccctgtatttttgagtcttcattcggaatgccccagtgtatacatgttgaatacatttgtaatccttttctcttattaatctgccttttgcaagttgattttttagtggaactttagagggtccttgtcctttatggttgcttgtctttactctttccttcatgaaagacttcttggctgggcatgggcttatgcctgtaatgccagaacactgggaagccgaggcgggcagatcacgaggtcaggagttcaagaccagcctggccaacgtggtgaaaccccgtctctagtaaaaatacaaaaattagctgggcatggcggcgcccatctgtaatcccagctccttgggaggctgagacaggagaattgcttgaactcgggaggcagaggttgcagtgagtcgagatcgcattgctgcactacagcctgggcaacaagagcaagactctgtctccaaaaaaaaaaaaaaaaaaaaaagaaaagaaagatttctctatagcatgttgatatggtttggatatttgtccctgccgagatctcatgttgaattgtaatccctagtgctggatgggggcctggtgggaagtgtttgggtcatgggggtggatccctcatggcttggtgctctttgtttttgttttttgtttttttttgagaaagagtctcgctctgttgcccaggctggagtgcagtggtgcagtctcagctcactgcaagctctgcctcccaggttcacaccattctcctgcctcagcytcccgagtagctgggactacaggcgcctgccaccacctcccgctaattttttgtatttttaacagagatgtggtttcaccatgttagccaggatggtctcgatctcctgacctcgtgatccacccaccttggcctcccaaagtgctgggattatgggcgtgagccaccgcacccagcggtgctcttttcaagatagtgaggtcatcaagaaagcagaggttgccagcatgcttttaaatgaccagatctcgctctgttgcccaggctggtgtgcagtggcgcgatctcggctcactgcaatctccgcctcccaggttcacgccattctcctgcctcagcctcctgagtagctgggactacaggtgccggccaccacgcccagctaattttttacattttagtagagacggggtttcaccatgttagccaggatggtctcgatctcctgacctcgtgatccgcccgcctcggcctcccaaagtgctgggatcatagatgtgagccaccgtgcccggcctaatttttgtatttttagtagagacggcgtttcaccatgttggccaggctggtctcgaactcctgacctcaggcaatccgcccgcctcggcctcccaaagtctgggattacaggcgtgagccaccacaccyggcctatttttacttttcagagacaaggtctcactatgttgcccaggctggtcttgaactcctggcctcaggagacccttttgcttcagattcccaaagtgctgggattacagatgtgaaccaccgcacccagtctctatttagtttttgggatcttccccccatcatttgcagctgaactgatcttaactctctggcctgcccaactgaattgttaatgctgctgcagctctgaatgggtgctagtttgggcatgccagtttgggcatgtggtgtacaggtgggggcaagtatatgtcagaatcctgagatggagtccctcaaatacacagcagaccactatcactggcaacccagcacttacacaagtgataaatccaaaaaacactagccaataaagaagactcagggattttgcttttttaatgtgggattgagatagttcatggtcttttggttttaagagactccatttcttttctttttatttttatttacttatttattttttgagatgtagtcttttctgtcgcctaggttggagtgcagtgacctgatcttggttcactgcaacgtctgcctcccgtgttaatgccagtctcctgcctcagcctcccgagcagctgagactactggcatgtgccaccagacctggctaatttttgtatttttagtcgagatggggtttccccatgttggccaggctggtctygaactccagacctcaagtgatctgccagcctcggcctcccaaagtgctgtgattacaggcgtgaaaccgtgcccagcctccatttctcttctttcaaacctgatctctgagagcctatatagatttgtggtggactgggttccctgctagaaaaagtctgacactatattcaatttttggtctttcaaaagtcttcttcttctttttttttttttagatggagtttcgctctttgttgcccaggctcgaatgcagtgacgcaatctcggctcactgcaacttctgcctcctgggttcaagcgattctcctgcctcagcctcctgagtagctggaattacaggcatgtgccaccatgcccagctaatttttgtattttagtagagacagggtttcaccatgttggccaggctggtcttgaactcctgacctcaggtgatccgcctgccttggcctccccaagtgctaggattacaggcatgagccactgtgcccggcagagccaccgcgcccagcctcaatttctttctatttccttttttgagacggggtctrgctctgttgcccaggctggagtgcagtggcacaatctcrgctcactgcatccccccacttccacattggagtgattctcctacaggcatgcaccaccacacccagctaacttgtattttcagtagagaaggggtttctccgtgttggtcaggctggtctcaaactcctggcctcaggtgatctgcccgcctcagcctcccaaagtgctggggttacaggcatgagccaccgtgtctggcctaaaacgttaaactcttttaaaagagttttaatgacacggtctgtaggaaaactatattttatatctccggtgaaatggctaagaaaaacatattcttatattcctcatgtatgaaaagaagacaataggttcttgctttttgctgtttttttttttttttttaaattacaggtggggcacagtggcacacacctgtaatctcagcactttgggaggcccaggtgggcagatcacaaggtcaggagattgagaccatcctggctaacacggtgaaaccccgtctctactaaaaatacaaaaaattagccgggcgtggtggcgggcgcctgtagtcccagctactcaggagactgaggcaggagaatggtgtgaacccgggaagcggagcttgcagtgagcagagatcgtgccactgtactctagcctgggtgacagagcaagactccatctcaaaaaaaaaaaaaaattacaatagaaaggttatgaaaaatgaaaagagaataaggaatacttggtaatgatcctaaacttctagttttggataaatctgaacaaggtactaaaatgttcagtttaatttttttttttttttgagacaaagtctcgctctgttgcccgggctgaaatgcagtggcacgatctctgctcactgcaacctccgcctcccagattcaagtgatcctcattcgtcagccttccgagtagataggattacaggtgtgtgccactatgcccagctaattcttatttatttatttgagatggtgtctccttctgtagcccaggctggagtacagtggtgcgatcttggcttactgcaacctccgcctcctgggttcaagcgattctccagccttagcctccccagtagctgggattacaggcatccaccaccacgatgggctaattttgtatttttagtagagatgagttttcaccatgttggccaggctggtcttgaactcttgatctcaggtgatctgcctaccttgggctcccaaagtgctgggattacaggcctgagccacctgcatcaggcctaatttttgttttttcagtagagacggtgtttcactattttggccagactggtcttgaactcctggcctcaagtgatccacctgccttggcctcccaaagtgctgggattacagacgggagccwctgcatccggtggacaattagttattgacaatatcaatgactgacaactgtggttgtaactcagataaaacaacaaacaattagttaacaaaatctttacattttcttttcctgcttttttgtagcgatggggttttaccatgttgcccaggctggtccgggactcctggactcaagcaatcctactgtctcagcctcccaaagtggtgggattacaggtgtgagccactatgcccggccaaaatctttacattttctgaaagggtgaaacattccaaaaatcatatggatagttatataaaatgtattaatgtcttttacttttatttttattttttagggataggatgtccctatgttgctcaggctggccttgacctcctgggctcaagtaatcctcctgcctcagactctgaagtacctgcgatactacagtaacataccattaaatatggttttttactcctctttacaaccctatgaggaaactgggttagacggggtgactcatgtctataatcccaggactttgggaggcctagttaggaagatcacctgagatcagaagttcacggttacagtgagctatgattgtgtcactgcactccaactcaggtgatcaaaaataaaaaaaggaaactgaatcagagttaaaagtcaccaaccagtaaatgacggaactgagatttaaaccttcaagagtatcagtatctgctctgttcgtttttggcaggctgggggcggcgtggggaaggtgtataactttttttaacttctcagagtgcttttacatttactttattagtcaaaaagtatagtatataaacttacctggataattaaaagaatgcctcttgtctcaacaattcagactactgaaatggacatttctcattcaaattcatgtaacttttaggcctggtgaggtgactcacgcctgtaatcccagcactttggtaggctgaggtggatggatcacttgaggtcagtttgagaccagcccgaccaacatggtgaaaccccatctctactaaatacaaaaaacacaaaaattagccgggaatggtggtgcctgcctgtaatcccagatattcgagtggctgaggcagagaatctcttgaacccaggagattgaggctgcagtgagccaagattgcaccactgcactccaccctgggtgacagaataagaatctgtctcaaaaacaaaaaaaactaaatttatgttaattttattaattgcttaatattaatatatattatctcacaagtatagaaataaaatcataaaataaaggaaatgtgacacatagatacatgtgcacacataattttagacagaattggtaatttactttctatctttgtgtgtgtgtgtgtgtgtgtgtgtctgtgtgtgtgtgtgtgtgttttgagacagggtctcactctgttacccaggctggagtgcagtggcatgatcatggctcactgcagcctcgacatccgggacccagtgttttttaaatttttttttttttttgagacagagtctagttatatcacccaggctggagtgccgtggtgtgatcttgctcactgcaatctctgcctcctgggttcaagcgattctctcgcctcagcctcccgagtagctaggattacaggcaggcacccaccacacctggctaattattgtatttttattgagacggggtttcaccatgttggccaggctggtctcgaattcctgacctcaggtgatccacccaccttggcctcccaaagtgctgggattacaggtgtgagccactgcacctggcttcactttttaaatttttaataaaatgtttcaagctacagaaaagtagctgggtgcggtggctcacgcctgtaatcccaacaccttgggaggctgaggaggggaggatcgctggagaccaggcgttggagaccagcctgggcaacatggcgaaactcccatctctacaaaaaatttaaaaaattagctgggtgtggtggtgcgagcctgtagtgccagttacctgggaggctggggagggaggatcacctgattctagctgtgatcgcaccactgcattccagcctcagcaacaaagtgagaccatctcaaagaagaaaaaaaaaaaaagacagagagaaagaaagaaaagtggagagaataatgctgccagtattccctaattatcttctaggtttggcaaatcttaatgatgctatatttgcttcagataacatttttaaatttagttttttgaatagttaatacatttgtatgttcaaaaaaaattatagttaagttcccatcccactctatcccatatgccactttcattgcataggttctagttatatatttttctgaggttgtgtgtgtatgtttgtgtgtatacaaacaaatacaaatatatttggacttactatttaaaaatggaaaagttaactttttaaaaaatgttttttctttttaatagagacagggtctcagtatgttgcccaggctggttttgaattcctgggctcaaacaatcctcctgcgtcagcctctcaaagtgctaagattacaggcatgagccaccaagtctgaccaaataactttttttttttttgagacagagtcttgctccgtcgcccaggccggagtgcaatggcatgatctcagctcactgcaacctctgcctcccaggttcaagtgatactcctgcctcagcctcctaagtagctggaattacaggtgcgcgccaccacgcccggctaatttttgtatttttagtagagatggggtttcaccacgttggctaggctggtctcgaattcctgacctcgtgatctgcccgcctcggcctcccaaagtgctgggattacaggcgtgagccactgcacccggccccaagtaacatatttttgacatttttttttgtttacattcacactctctcgcttttttttttttttttttttgcgacaaggtctcactgtcacccagactggatctccagctggatcgccagcagtgcgatcctagtcactgccgccttcaacttctgggctcaagccattcgcctgcctgggcctcccaaagtgctgggattacaggcgagccacaccgcacctggccagtgtctatgttcagccctatttttsctctctttaccacctcttttctcagcttattattcaataaacaattcataaaactctgagttcgaagcattctgctatgaactctgaagaagcggtaatttcttattcactattgcttgcctctgtcctttttcctcctcccacaactcagttttccaaaaaccgagacctatttccaaggtttaaagtgccgggcacagtggctcacgcctgtaatcccagcactttgggaagctgaggtgggaagatcgcttgagctaaggagttcgacaccagcctgggcaactaatccccgtctttgcaaaacaaacaaacaaacaaacaaaaacccattaaaacaaaaattcggtgtggtggtgttagtcggggaagggaggctgaggtgggaggatcgtttcagcccgggaggtagagactgtagtcagccgagatcgaatcactgctctccagcctgagtgatagagcgagacttagtctcaagaaaaaaaaaaaagaaaaaccccagaataacaagtattaactttatgcaaataaggaggcttaactgagttcctctgaagaattcagtagggcggaaattgtgggaccgaaggcgggaccggcgtgctgggcggaacctgagaggcgggttttgcaggctccgcccagccccccgcacggatttggcgccaaacgctgcgggcccttctcgccccaggagttcccgagtatcgcgagaagcgcgcttagtctgcacgccgaggtccgcgctgtgtcccgtgttttctgcgtgaggtgagagctggctggcgggccaatgaagttcttgcggggagaggggagtcggactagccagggagccagatggaagagccagggagccagacagactagcgggaaagcctaattgtcgcaggaagggggtcaggaggttggggggtcgacctgacccggcctggagaggcggggaggtgggcgcgtgtcccggttgcttaggttttgggatgcctcttactctgccaagccgcttagcgggagggaacgtgttcctgatcatctttaccccaggcttctgtccggggcgtgtcaatgtagaaatcccccagcgaatgttggatgaatgaatgaagttgaagagagggtaggcggggaacgaggatgagggggacggctggagaagaggtatgggaggttcgatgtttcagggatggcacccaagggggacatcgaggcagcacggtagcacttcctttgcgatgaggggcgtctctttggacttcttggaaaagaggtgggcattggaaaccagggtctgggaacaaaccgtggtttggacataacatttgttaccttcactcttctgggagttggagaagtagaggaggaagttcagacaatttcataagtgtctaaaaagagacagttatgcgaccattgacgaggagtaaaagtcgtctattgagcatcttattcactacaaatagaagaaagaaataccagtttcctgacaagccccaccccatgcttggccagttcctgagtacacttaatatattttaggtactgtcatcaaactcaaagctcgctgtcagcctcaaaggtctgaaccctagtatagattcttgtagcttgcttgaagttacagygggtcatgatcaggaattgatgctttgtttttgttttgaaacggagtctcgctctttcgctcaggctggagtgcagtggcgcggtctcggctcactgcaagctccgcctcctgggttcaaatgattctcctgcctcagcctcccgagtagctgggactacaggcgtgtgccaccacgccccgctaattttttttgtatttttagtagagatggggtttcactgtgttggccaggctggtctcgaactcctgacctcatgatccgtccgcctctgcctcccatagtgctgggattaccggcgtgagccaccgcgcccagccgatgctttgcttttatatttatggtaaccgaaatttagaattagtgagattttaaagatcgtctaactccaatttggggaaactggatttttttttgcattnnnnnnnnnnnnnnnnnnnnaggtgggcattggaaaccagggtctgggaacaaaccgtggtttggacataacatttgttaccttcactcttgtgggagttggtgaagtagaggagtaagttcagacaatttcataagtgtctaaaaagagacagttatgcgaccattgacgaggagtaaaagtcgtctattgagcatcttattcaccacaaatagaattaagcaaatgcgggtttcctggctggctcccccccgtgatcacagcgtttttgggggcacaaaagggcggatcacgaggtcaggagatcgagaccatcctggctaacacggtgaaaccccgtctctatgaaaaatacaaaaaattagccgggcgtggtggcaggcgcctgtagtcccagctattcgggaggctgaggcaggagaatggcgagaacccgggaggcggagcttgcagtgagcagagatcgcgccactgcactccagcctgggtgacagagcccgagactccttctcaaaaaaaaaaaaaaaaaaaaaagatatatattgagcacttgctgtgtaacagcattggggttccagctgtgtaacacagagagacttaacctcgttgccctttttgagctacagtctagtttgggagacgaacaataaataactgtataaataaaacctgatattgaaactggataagtgccatgacacttgtacttgacactatgaatgcttactaaagaaggatttagagaaattgaggtaaacttttgaaaaggtgatagttgagatctggaagatattaggagtcaaggaatagctttttcaagacaggaaatagtatttgtaaagagccagtggcctgagggatatagctctttcaaggaaagaaaaagcatagagtagtgtgaagtgagactggtgaggtagtaagaggctggatcacacagggccttgaagttttgtctttatcttaagagcaatcagaaaccattgaaatacttaatccaagtgaggtgatcagctttatattttcagattcagtctagatgtaatagggacaattgaaggagacgagtggatgagagtagtggagtaatgcaagcaagaaatgttgggaagtggttatagagataaggagaaatagacagattcaagggatatttaggaaataagatgggcaggatctgtgggataggggaaggaattgctaaagatgacttgtaggtttctgaattgcatagctggatagatgtcatttaatgagttaggaaaatttagaagtttggttttgtacctgctgagttacaggtgcctttcaggcgtttaggaagtgtaaaatgggaagtagtgatctggatcgcagagtcaaggcctagggtagagataaaaatcagggagtcatctataaatcagtacttattaaagctctgtgcataaatgaatgaagaagccctaggatggagtcttggatacttaatggccggggtagaagataaacctgcaaagaaaatccaggaggagtgcccagaaagggaggaaagcctcagcctcctgagtagctgggactacaggtgcgtgccacaacacctggctaaattttttttatatttttagtagagacggggtttcactgtgttggccaggctggtctcgaactcctgacctcatggtccgtctgcctctgcctcctgctgggattaccggcatgtcttagaagttaaggtaaacatttttcccagaaaaaaactgaccaaaagtgtcagttgttattgagaagttaagtaaggcagtactgaaaaacattctttcgagttatcaacctgaggataatttcccattcaggaaaccttacctagaagaccaatatgtaaacacatttaaaaatttttttttatttttaatttttgtgggcacgtagtaggtgtatataaacagatttttttttttttttttgagacagagtgttgktctgtcgcccaggctggagtgcagtggcggcatcttggcttactgcaagctccgcctcctggattcacgccattctcctgccccagcctgccgagtggatgggactacaagcgcccgccaccacgcctggataattttttgtatttttagtagagacggggtttcaccgtgtagccaggatggtctcgatctcctgacctcgtgatccgcccgcctcggcctcccaaagtgctgggattacaggcgtgagccaccgcgcccagcccagattttttttttttaagcagctctaattgaagtgggggtgaagtacctatatcctgcgtatttcataccctattggatcacagtttgaaaccctctgaaaagtcaaattcatctttttatggtaggggaaactcaatagttgaggyaaaaggatttgttcaaaatgatatagttatttagtgttagggtctacattggaacttagatttctaggctagtcttttttttcataattagtatcttctctacttttcatgatgtgtgagtttgaaatgtggtctaactgattgaaacacatgaaatggctgcaggtagaacttgtctatatagyggagactattttggatgaatacaaataactttaattttttcccctagaggaaaagatgctagaaccacaggagaatggcgtgattgacctaccagattatgagcatgtagaagatgaaacttttcctcctttcccacctccagcctctccagagagacaagatggtgaaggaactgagcctgatgaaggtatgtatagagagttttaaaaaggaggctgtgaggccaggcacggtggctcatgcctgtaattccagcactttgggatgctgaggcgggcggatcacaaggtcaggaatttgagaccagcctggccaacatggtgaaatcccgtctctactaaaaatacaaaaattagccggggtgtggtggctgtggtaaaaggtatttgaggagaaaaaagaaaaaaaaggaggctgggcacagtgggtcctgcctgtaatcccagcactttgggaggccgaggcaggaggatggcttgagcccaggagttcaagaccagcctggcgagacctcaactctactaaagatttaaaaattagccgggtgtggtaggcagcacctgtacttccaggtactcgggatactgaggcagaagaatctcttgagcctaggagtttgaggctgcagtgagccaagatcgcaccactgcactccagcatgggcaacagagtgagaccctgtttcaaaaaaaggtgtcccatgtttagttatcttatcagcttggaaatgatacataataaataatacaaatcatttaagtacagtaatactgaatcgtggtttgtttcaccagagtcaggaaatggagcacctgttcctgtacctccaaagagaacagttaaaagaaatatacccaagctggatgctcagaggtacatttactatattcttatacatttatactttttatttttaatatccattgtttttcttctaatgttataaacttttggttggtatgatgtggagctcttatatttctaaaaacttttttttagttcagcagaacatattttttcttatggtcttgctttggaccaaactctagaaaacttgaaattaggctgggcgtggtagctcacgcctataatcccagctctttgggaggcctacgtgggcggatcacgaggtcaggagattgagaccatcctggctaatacggtgaaaccccgtctctactaaaaatacaaaaaattagctgggtgcagtggtgggtgcctgtagtcccagctacttgggaggctgaggcaggagaatgacgtgaacctgggggaggccgagcttgcagtgacccgagatcgcgccaccgcatcccagcctgggcgacagagtgagactccgtctcaaaaaaaaaaaaaaagaaaataaaacttgaaattaaaaacatacttttattcacagattaatttcagagagaggacttccagccttaaggcatgtatttgataaggcaaaattcaaaggtaaaggtcatgaggtaagaactgatttttatgttagacctttgttttttaaaatagcaataaaaatgtggacccattatgatcttggaaatctcagaatgctttaagatactatccttagtcgtcgtatgtcttgagaaacagttgtgatgtactagaaagggaactgtttgaagaattagaaagcatgtcttgtgcagtctcattttttgctgcttaaaccttggctataggaaaatcacacctgtgtctgtaaagtctcagtttttattttataatttacaggaataaaatttactttgtctacctcaaagttttaaatttcatgagggcaaggactctgcctgtatcagtcacttatgtgtccccaagatgtggcacagtgcctggttcataataaatgtcagtaaagtgtggttaaaaaatgaatacatttagtaacgtgaatcactttacaaatgcacattttgaaatctatttttgaattatgtaggagtgtaggtataattttttgcagatgatagtatatttttagagagttttgtagtttttcaagtgtttctaatatctaatatattcttttttttttttttttttttttaagacggagtcttgcttgctctgttgcccaggctggagtgcagtggcgcaatctaggctcactgccagctccacctcccaggtttacgccattctcctgccttagcctcccgagtagctgggactacaggcgcccgccaacaggcctggctaattttttttttttgtatttttagtagagacggggtttcaccgtgttagccaggatggtcttgatctcctgacctcgtgatccgcccgcctcggcctcccaaagtgctgggattacaggcgtgagccactgcccggcctactatcttttaactttattaagtgtttttttttttgtttttttgagatgaagttttgcccttgtcacccaggctggagtgcaatggctcgaccttggctcactgcaacctccgccgcttgggttcaagcgattctactgcttcagcctcccaagtagctgggattgcaagtgcccaccaccacgcccaactaatttttgtatttttggtagagatggggtatcaccatgttggccaagctggtctggaactcctgactcaggtcatccacccgcctcggcctcccacagtgctgggattacaggcgtgagacactgcgcctggccaactttattaagtttttgtactgggattttttttcatctaatttttatgaatctgtatccaggcggggtgctatggctcatgctgtaatcccagcactttgggaggccagggtgggcggatcacttgaggccaggagttcaagaccagcctggccaacatggcaaaacctcctctctactaaaaaatacaaaatttaggccaggtgtggtggcgcacacctctaatcccagctacttgggaggctgaggcatgagaattgcttaaacccgggaggctgaggttgtagtgagccaagattgcgcccttgcacttcagcttgggtaagaaagcgagaatctctctgaaaaaaaccaaaaaaaccaaaaaaacaaaaaaaacccctgtatccagtgctcttttagactgcagtcctctaagttcttaataattttctctcttttttttggatataggatctcgctgtcacccagtctggagtgcagtggtgtgaacttggctcactgcaacctctgccccccaggctcagggagtcctttcacctcagccacctgagtagctgggtccacaggtgtacaccaccatgcctggctattgttttgtatttttagtagatatggggtctcaccatgtttcccaggctggtcttaaactccttagctcaagtgatccgtccccctaggcctcccatagtgctagaattacaggtgtgaaccactgtgtctggccaatatttttcttattaaagttccttttataagtttttcaaccttataaatataaaatgaccccagtgattttggcatagcttttcagttctgaaagttgctgacggggtcagctgtgagaatgagactcctgtttagcatttttatttttatgtggcaggctgaagacttgaagatgctaatcagacacatggagcactgggsacataggctattccctaaactgcagtttgaggattttattgacagagttgaatacctgggaagtaaaaaggaagttcaggtaagtgttgagatgattataaatatcattcacatgctaaatggtagggtagatttagttgaggctaaattgctgtttaaagtgttcattttgaaatctcttttggtagagagggaaaagtaatagcaaattatctccccccaacatgattggtaaagaggtaaaaataaataatctcttttcattttcagacctgtttaaaacgaattcgacttgatctccctattttacatgargattttgttagcaataatggtaagaatataggtttatctactttataacaattttgcttttagaaatagatctaggcagggtgtggtggctcaaccctgtaatcccagcgctttgcttttttgtttcatgtttagggacagaatcttgctctgtcacccagtctggagtgcagtagcacaatcatagcttactgcagccttcaactcctgggcttaagggatcctccygcctcagcctccygagtagctgggactgcaggtgcatgccattgtgcctggctaattttaaaatttttgtagagatggggatctccctgcgttgccttggctgctctcrcactcctggcctcaagccatactgtgcctggccaacttttttttttttgagctggagtctcactctagcccaggctggagtgcagtggcatgatctcggctcactacaacctccatctcctgggtcccagttcaagcaattctcctgcctcagcctcctgagtagctgggatcacaggcatgcgccaccatgcccagttaatttttgtatttttttttttttttttttttttagtagagatggggtttcaccatgttggccaggctgtttttgaactcctgacctcgtgatccgcccaccttggcctcccaaagtgctgggattataggcgtgagccactgcgcctggcttgttattttttttttgaagactagccacatgcaatagtgaaaagggaggaaagagtagaacaaggagtttgatctgtgactgtgaattgataactcattacctttggatcaaccccagttctttgggaggccatggaggtaggattacttgaatcctagagttggagatcagcccgggcaaccgagtgagaccccatctacaaaaatttttaaaaagttaatcaggtgtggtggcacatgcctgttgtagctactcagggggttgaggcgggaggatcacttgagcccaggagttcaaggctgcagtgaaccaggatcacaccactatactctgggcaataaatagggtgagagaccttgtctggaaaaaaaaaaaaaaaagaaagaaagaatagaagtagttagaggaggcagtattataggaccagatccttagtccatattgtgtatataattagagtatggtaaagtacaataaatagataagttaaaatgccttggtagtgggctgggcgtggtggctcatgcctataatcccagcactttgggaggctgaggtgggcagttcacttgaggtcaggagtttgggaacagcctgaccaacatggggaaaccccatctgtactgaaaatacaaaaattagctgagtggggtggtgcacgcctgtaatcccagctactcaggaggctgaggcaggagaattaacttgaatccaggaggtggaggttgcagtgagccgagattgcgtcgttgcaatccagcctgggtgacagagtgagactcttgtctcaaaaaaaacaaagccttggtacatctagaatgttgtatatcaaatttgttgtagaatatgaacttttgaaaactctggtgacccactgatcctatatagcacttgttaataaaaatatatatcaagataaaagtgttcatatacatatacaccattggataaagtggtactgggaaattaggcaaaataatttatgatgaaagtttgcatttcacttggagcgcagctctcggatataggactttagtgagacctttgtgactgttcctggtattgattgcatttgttagttgtacagtgcaaccatagacagtcacacacattaaaacagatggttcctgccgacagggtctgtatagttatcagattttctgtgcgatggctccatacatgtttgtttttgttttttaacttttaacagatgtggaagaaaatacaggttccatgtagaataccctaaagttatttataaactactttcaaacatgtaaaggaatgtgatttaggccgggcgcggtggctcacgcctgtaatcccagcactttgagaggccgaggcgggtggatcacaaggtcaggagatcgagaccatcctggctaacatggtgaaaccccgtctctactaaaaaataataaaaaaaattagccgggtgtggtggcgggcacctgtagtcccagctattcgggaggctgaggcaggagaatggtgtgaacctaggaggcggagcttgcagtgagccgagatcacgccactgcactccagcctgggcgacagcaagactccgtctcaaaaaaaaaaaggaatgtgatttaaataatccgtgatttaaatttcttggtaaaatatggtatgtatggatggcataggattgggtatatgtaaaggaatgagttattacagttctaaattccacagcatatactactgggttactttttgaggtgcccggtatgtgataaaggttcagggctaaaaaaatgactacgatcaggcccctttgtgggcaaatacagtagtgaatgaatcagacatacaacattgccagtagtgtggtaggtgttgtaattagaggtatgagtaggtcgcagggtgggatgcaaaggagagcatagttacatgtccctgggggtagagggagaacttcacaaaggaggattcagaagaattttgatttgggggtgagaggaagaaaaaagaaattaaaaagaaaaaaagtattttgaatgaacagtagaggtcaggcagaggtgattttgaatgggggagccatctatgcagaggtgtaaattaacttggatttcaggctctatattctatggcagtaaaaaaaaaaaaaaaaaaagataaattaaggccaggygcagtggctcacgcttgtaatcccagcactttgggaggccaagacgggcggatcacttgaggccaggagttcgagaccagcctggccaacatggtgaaaccccatctctactaaaaatacaaaaaattagcctggcgtagtggcacatgcctgtaatcctagttactcgggaggctaaggcagtagaattgcttgaacccggaaggcggaggttgcagtgatccgagattgcgccattacactccagcctgggcaaaaagagtgaaactctgtctcaaaaaaaaaaaaaggagataaattaacatggaccattcagagaattacaagcatgctgaaatatagggtacaaataagagaactgaatctgagatttttgtttgttgtgtcatatatttaatttgtatcttaatagtctccaaatttttttgatcaggtgccacagaagtaaaaatgttttgaccattttatttgttgattaaatacatttacttctatacggatgtgatttgtaatgtacttttttttttttgagacggagtctcactctgttgcctaggctggagtgcagtggtgcgatctcrgctcactgcaacctccacctcagttcaagtgattctcctgcctcagcctcccagtagctgggattacaggtgtgcaccaccacacctggctaatttttgtatttttagtagagacagggtttcatcacgttggccaggcttgtctcaaactcctgatttcagttgatccacctgccttggcctcccaaagtgctagagttacaggcgtgagccagtgagccactgtgcccggcctaaatttagtttttgtagtgacaggatctcactatgttgcccaagctggtctgtatctcctggcctcaaacagtctgccttggcctcccaacgtgccgggattacaggtgtgagccactgtgcttggcctccagctgttccttggacatttcaggcacatttttattctaaggcttttgtattgccgtactctgcctggaacactcttcccttgtacccctcaagtccgcatgactgtcttacactcctcaaactgtgctcaaatgacaacttggtgaagcctccccattacactgttatagttgcatccccactcccatcatttctgactcccctatgctgtttccttttgcattgcccttgtttccctttaatttttatatagtttacttatgttttagtttgtctttactacaatgacggcatcctgtaacacactgaatatttctagctttagcttctttgccataatcacttgccaatgaatgttgcagtaaatgaatttcatgcgtacttctaattttttaaaatttcatttttatttacttatttcttttcgaggcagggcctcactctgttgcccagggtggagcacagtggcatgatcatagctctgcagcctcgacctccagggcttaagcaatcctgccacctcagtctcctgagtagtttggattacaggcatgcaccacctgcctgcccaagtttttcttttttttttttttctttttttttttgtagagaaagggtctccctatgttttgcaggctggtctcaaactcctgggtccatgtgatcctcccaccttgggttcccaaagtgctgggattataggcgtgagctgctgcacccagctttaaatctcattttaatcctactcaaaggaaccagctgctgcttacaaaatatattgtttatataaataggtcatttactactgaagatacctttgttttcttggttcataaaaagtagttttttgcttttttttttacttttttttgtaatagagacgaggtcttgctatgttggtgatgttggtcttgaactcttgttctcaagcaatccttctgcctcaatctcccaaagggccatgattacaggcgtgagccaccttgtccagtcaaaattagttctttgagttcatttgaagccaggagttagggaccagagtggtcaacacctatagtcccagctatttagaaggctgaggcaggaggatcctttgagtccaaggagtttgargctggagtgagctatgatcataccactgtactctagcctgggtgacagagtgagtccccatctcttgaaaaaaacaaaaaaaaagtagttatttatgtattttcttattgatttagaatcctgcaaccctgtaagatgaagcacattaaaaaccccatgtttcataagtggttctttttttgagacggagtttcactcttgttgcccaggctggagtgcagtggtgtgatctcggctcactgcaacctctgcctcccgggttcaagtgattctcctgcctcagcctcctgagtagctgggattacagtcatgtgccaccatgcccgactaattttgtatttttagtagagacggggtttcaccatgttggtccgactggtcttgaactcctcacctcaggtgatctgcctgcctcggcccccaaaagtgctgggattacaggtgtgggccactgcgcctggctcataagtggctctaatgcttgtttcttaactgcttcagcaatgtttcatacatatactcttatcagtatttcctgacaatggaggccattttagtttcttcctacatttttgttttccatgtcaggaaggaaaagtggcttttcgtttttcactattaaggaagaaaccttaaaagggagtttgattgtaaagggctgaattaagtatcatgatttttaaatctcactgaaataattgtaaaggtctgtctttatgttttaaatgtttttttaattgtgatagtttttctataattagctaatatttcaaggcataatatatacatagaacaaggataatgtatataaatatttcaaatggtgacttgaattttttgaccaacttrtcagatgtgatggggtttatctttcttttaatttcataatatggatgatgtagatagaaggtaaagtgtcagctctgctgttttttttattttttgcttgtgcttctattctacctacaggcattttgttattttgtagaatctttttaacctaacacttgtacattttgttggggttgtttggttaaattagtaagatgaaatccatcagtttatttgactgggcaatcagaaacagctgtatatctgacattgtaaagtcagtgggggccccattctccacccttttacaatatggatcttgcctatagagtggctcacagatcagacagtaactctgtcataaggacaagggacagttaaccactgccagtcttattttaaatatgttagtaaaacatagtttttcttaattcttaaatgaaatataaatggaagatctattatttactttaataccactgtggatcatgttggggacatcctaccttgagttaactggtttacagggctttaataatgtattacttataatgtagagcacactgaatttaaaaagaaattaatttggaaatatgtccataaagttttaaatttcttttcttttttcatttgtctgtgtttaactctacaaaagataatgtcctacataaaattaccttttactggccgggtgcattggctcacgcttgtaatctcagcactttgggaggctgaggcatgtggatcacctcaggtcaggaatttgagaccagcctggccaatacggtgaaaccctgtctctactaaaaatacaaaaattagctgggcatggtggcgggtgcctgtaatcccagcttctcgggaggctgatggaggagaatcacatgaatctgggaggcggaggttgcaatgagccaagatcgaaccattgcactccagcctgggtgacaagagtgaaactccgtctcaaaaaataaaataaaatgtattaaaattaccttttcccatattgacactgggaaactattgaaatgtgttggtttaatgtagaacaagaatatggtttggattccttaagctctttgattaggccaagcataaaatatttctaattacaatcaagaactttttgtttctttcttttttttttttttttttttttgagacagtcttgctctgtagcccaggctggagtgcagtggcgcaatcttgctcactgctgcctccgcctcccgggtcccggttcaagcaattctcctgcctcagcctcctgagtagctgggattataggcatgcgccaccatgcccagctaatttttgtatttttagtagagatggggtttcaccatgttggccagactggtcttgaactcctgacctcatgatccacccgcctcggcttcccaaagtgttgggattacaggcgtgagccaccgcgcccggccttcatgcatattttaaattgtatttttatttgacttagcattcctctttaaactgatttataaatatttcttatttaattgaatcaagcatgtattcacaacattcttatacttcacaaattgttttttcaggtctgtcaccttgccactttaaattctttttcaatgagaagcccttctctaactagtctaacaccacagatgtactatttcttttctattgcagatgaagttgcggagaataatgaacatgatgtcacttctactgaattagatccctttctgacaaacttatctgaaagtgagatgtttgcttctgagttaagtagaagcctaacagaagagcaacaacaaagaattgagagaaataaacaactggccttggaaagaaggcaggcaaagctgctgagtaatagtcagaccctaggaaatggtaaattttatgccaaattttatatgctaccattaatatatcaaggacatgttagaaattttaacttctctgctagcccccaaaataaaatacttctaggagtggaaaagtgtgatattaagtttatgtatattttagagacagtgtgtgtgagagaggagagagagaatggctgtgttccttaaagaataaatgaatccaagatggttttctggatagctgagtacctcttaaaaaattattttaatcacctggccaggcgtggtggctcatgcctgtaatctcagcactttgggaggccaaggtaggtggatcgcttgaggtcaggagttcaagaccagcctggccaacatgatgaaaccccatctctactaaaattacaaaaattagccaggtgtggtggtgcacaccagtaatcccaactacttgggaggctgaggtacgagaatcacctgaatcaagaaggtggagattgcagtgagccaagatcgtgccactgcactccagcctgggtgacttgagtgagacgctctcaaaaaaaaaagaatttattttaatcacttgaaattgattttaaattcttaataaacattcttccctgactccttaaagcatgtgccatatactattacctttaggacaataattataacaataaataaagaaaaaaataggccaggtgcagtggctcatgcctgtaatcccagcactttaggaggccaaagtgggccatcacccgaggtcagcagttcaagaccagcctggccaacatggtgaaaccccacctctactaaaaatacaaaaattaactgtgcatggtggtgtgcacctgtaatcccagccacttgggaggctgaggcaggagaattgcttgaacccaggaggcagaggttgcagtgagctgagatcaacccattgcactccagcctgggcaacaagagcaaaactccatctcaaaaaaaaaaaaaaaaaaaaaaaggccaggcgcagtggctcacgcctgtaatcccagtactttgggaggctgaagtgggtggatcacaaggtcaggagatcgagaccatcctggccaacatggtgaaaacccgtctctactaaaaatacaaaaatttgccgggcatggtggtgtgtacctgcctgtaaacccagctacttgggaggctgaggcaggagaatcgcttgaacctgggaggtggaggttgcagtgagctgagatcgggccactgcactccagcctgggtgacagagcaagactccgtctcaaaaaaaaaaaaatgctttttcttgtgttttgtcacttggttgtgagctgtacttttgaaagtagctgtttaatttgcttatctttagcattcccttttcacttctaaaactgcctgaagatttgctttattaaaaaatatattattagtatttttagaaacgttgtcaatctgtcacccaggctagagtgcagtggtgtgatcttgactcactgcagccttgaacttctagtctcaagcaatcctccagcattgggcttccaaagtgctgggattgcaggtatgagccagtgtacctggcctaaatttgctgtttttaacacacattgtgggtttggaaactatataaccaaatttgttaaaactatatttagaaagaattgcaagttggttttgaatgaagtaagcaggattgcgtatatctttcttaatttcccattcagtttttcctttcaaaatggaaaaataagaattataggcccagcacagtgtctcttgcctgtaatcccagcactttgggaggctgaggtgggcagatcacttgagcctgggagttcaagaccagcctgggcaacatagtgagtccccgtctctacaaaaaaaaaaagaattataataactagataccatgttgtaaacgaagtttcacccaatatattaacatttttaagtgaaaattattttggctactttttttttcagttaagatgaatttactttttctttttgtcttttttttttttttttttttttttttgagatggagtcttgctctgtagctcaggctggagtgcagtggcgtgatcttggctcactgcaacctctgcctcccgggttcaagcagttcccctgcttcagcctcctcaagtagctaggactacaagtgcgtgcccccatgcctggctaatttttgtatttttagtagagaagggatttcactgtgttggccagggtggtcttgaactcctgacctagtgatctgcctgcctcagcctcccaaagtcctgggattacaggtgtgagccaccatgcccagctgaatttactttttccttttttttttttttttttttttgagacggagtcttgctctgtcacccaggctggagtgcaatggcgtgatctcggctcactgcaagccccgcctcccgtgtccatgccattctcgtgcctcagcctcccgagtagctgggactacaggtgcctgccaccacgcctggctaattttttgtatttttagtagagacagggtttcaccgtatcagccaggatggtctcgatcccctaacctcgtgatccacccacctcggtctcctaaagtgctgggattacaggtgtgagccaccgcacctggccaatttactttttctttataaatggatgttttattagtaccatgtgaaacattacatgaagatagcattattcttgatggcagtggcttctttgctgtcaatatcaagtatacctggcagttggtatttaaagctcacctctgtttatcatatacaacttaaaatttgtccaaatggaaataagtactttaaagtttcttatggatcactctgacataaaacctaaacgcacttggtttttattagacctctttctagtagttttcagttttgtttttttagatggggcctcactgtattgcycaggctggagtgcagttgctgatctcggcccactgcaacctccgcctcctaggttcaagcgattctcctgtcccagcctcccgagtagctgggattacaggcgtgctccaccatgtccggctaatttttgtattttttgtagaggcagggtttcaccatattggccagactggtttcaaactcctgaccttgagtgatctgcctgcctcagcctcccaaagtgctgagattacaggcatgatccactgtgcctggccaatagtagtttgattttgaataagaacagttacatttgactatgatccaagagtgtgagttgaataacattcaaaaccattttgctttttttttgtttttttttggttataggatctcactttgtcacccaggctggagtgcagtggcacgatcatggttcgccaccatagccagctaattatttttttttttattttattttttttgatgttttgttgacatggggtctcactatgtggcccaggctggtcctgaactcctgagctccaatgatcctcccacattgttgggatcgggcctggcctctcttgcatttaaaatggatcttaattgtataaaaatgggcttattggctaggcgtggtagctcacgcctgtaatcccaggactttgggagcctgaggcgggtggatcacctgaggtcaggagttcgagaccagcctggccaacatagtgaaaccctgtctcttctaaaaataccaaaattagccgggtgtagtggcgggtacctgtaatcccagctactcgggaggctgaggcaggagaatcacttgaacccggtggaggttgcagtgagcccagatcgtgcgattgcactccagccaaagtgatggagcgagactccatctcaaaaaaaaaaaaaaagatatatttagaagaaagtgatcataattaacattaagtgatcttagacttcattttactaaactgagcttttgaagaggtttgtactcatgcggtaagattggatcaggtacttataatgaataataatggtatgatttctttcagatatgttaatgaatacacccagggcacacacggttgaagaggttaatactgatgaggatcaaaaggaggagtcaaatggattaaacgaagacattcyggacaatccatgtaatgatkctattgccratactttaaatgaagaggaaacactgctggaccagtcttttaaaaatgtgcaacagcaacttgatgctacatccagaaatattactgaagctagataagtttccattaagagaaaatgtatctgttaagtcatcgtcctgcaagcttggcgttactatgtattttttcttcttggagtgaaaatccttagatagtaaaactgttatagattattgtttaaaatctgataatctggtatttatttataattatgcttgtcactttagttaaatctatttgttctctttagtgtttgtttttatataggtatttcttcataaaatgattaggaggtaataagcagtttctgctgctggtctgtcattgaatgccttgttttcactaagttgggaggttttgtttctgttttttactgctccttgcaaagcagggctaatccatggacagtgtgcccagagtagtctagttgaagttttttgttttgttttgttttgttttttttgacacagagtctcactctgttggccaggctggagtgcagtggcacagtcttggctcactgcaacctctgcctcctgggctcaagcaattctcctgccttagcctcccgagtagctgggactacaggcgtgtgccaccacgcttggctaatttttgtacttttagtagagatgaggtttcaccatgttggccaggctggtctcaaactcctaacctcaggtaatccgcccccctcggcctcccaaagtgctgggattacaggtgtgagccaccgcgcccagcctgggtgaagttttgagatgtacatatatactgaatattaatgtcaattttttaaaagaagtaaaaattatcttaaaaactatctacaggctttatgggaggttttcattgctatatagttctgcagtttacacttttggtaaatacaagatttttacatgttttctaaggagttactttaatagttaaaaggtcacatgaaaggccgatacattgcctggccctcataggtgctagggtagttcaaagaatgctttttgggaacttactgactagttggagtgaaacttgcaaagtatcgtggggaacatagcatctcgggaggatttacaggaaagactttgcttttggtggaggagattccaagtattgggaagcacatgtacaataatgatacagaaataagattaaggggataaggcagattttaggaatgctgattttgaggttagatgtgttagggccaaatcgtgagaacacctgattggagttcttcctgccaggtagagggggtagttacaaataagaaaggttagtgttaggaaaggctctcccaccccaccccctcacccctacccacagtcccccgccactattgtgtgtgtgtgtgtgtgtgtgttggtctcactgtcactcaggctggaatacagtggcccaatcctaactcactgcagtctcaaactcctggggttcaagcaatcctcttgccttagcttcccaagtagctgcgactgcagacatgtaccaccatgcctggctacttttttaatttttgtagagatggtgtctcactatgtttaccaggctggtcctggactcctggcctcaagtgatcttccatggcacttggcctctcactctctttttccttggggaaagggcagagtgatggtgctatagtggcttccatctgcaaagccaggacaggcaggcatcttctcttcaggctttctgacttcaggtggggacaggaagtgacaaagatggtttgattgaaaagccaggaagttagctcaggtgtggtggctcacgcctgtaatcccagcactttgggaggctgaggtgggtggatcacgaggtcaggagatcgagaacatcctggctaacacagtgaaaccccgtctctactaaaaatacacacacaaaaaattagctgggcatggtggcaggcacctgtagtcccagctactcgggaggctgaggcaggagaatggcgtgaacctgggaggcggagcttgcagtgagccgagatcgtgccactgcactcctgcctgggtgacagagcgacactccatctcaaaaaaaaaaaaaaaaaatttaagaaaagccaggaagttgagcacaagaacatcaaggagaacatctgggatgggggtgggggaggggtttgtgggcctgctgggaactgccacagggatgggccaagaagcatgtgcattaggaggattgtggctaactgcagccaataggggatcagctagaagatggagagcagtttcaagatgccaatgcctatagaaactgcttcctcaggagggcaggttcaggcttctgtctaccctcacaaactacattagataactgagaaagaagagttaatttttcttttttgagatggagactcgctctgttgcccaggctggagagctgtggcgcaatctcagctcactgcaacctctgcctcctgggttcaagcagttctctgcctcagcctcccaagtagctgggattacaggcacctgccaccacacaaggctaatttttgtattgttagtagagatggggtttcaccatgttggccaggatggtcttgatctcttgactttgtgatccacccccctcagcctcccaaagtgctgggattacaggcatgagctactgtccctggccaatttttgtatttttagtagagatggggtttaatcatcttggccaggctggtcttgaactcctgaccttgtgatccacccgcctcggactcccaaagtgctgggattataggcgtgagccactgcgctcagcctagagttaatttttctagtggggtgtttgctggcaaagtaacaagtttccaacaaggggaaggccaatgcacctcatcaaaatgggagagtgggaaggaaggcctgtgacagaactttacctgtgcatcctaccacccgccctgtgtcctaatcccagctagtactggagacagcaggtaagggttgagtcaaatatgaaataggaatttttaagtggagaagtggactcaggactaagtcttattatctgaaagtgactgaaaattacctgacaaatgtcagaggggcctatgacccaaacgtaattactggaaaaataaaacatttgaaagaactgattggagacgagataaccagtaatttcgggtttattaaacttattagaaaggggccatctgcagagccaccacttactgtccactcattactgaaaactctgtttccatagtgacctaattatactttatttaatgcaactttaatgaatgagagaactttttttttttttttttttttttttgagatggagtctcgctctgttgcccaggctggaatgcagtggtgcgatctcggctcactgcaacctcctcttcctgggttcaggcaattctcctgcttcagcctcccaagtagctgggactacaggcgcatgccaccacgccgggctaatttttgtatttttagtagagactgggtttcaccgtgttagccaggatggtctcaatctcctgacctcgtgatccgcccgcctcagcctcccaaagtgctggggttacaggcgtgagccaccgtgcccggctgagaacattttacatatatgcgaaatagctacccagtcctgatcgactagagcactgagtgacacacattaaatgttaagtttgaaaagactgtaaaacattcacatatgacagctcttagtgaagtaagagcctctcatattccataattgtttgaaacatccaggagagctaggtcccgtatctcctctagaagtgtgtataggctccttccctttgtttggcgatattcttgatattcctcctgaatgatgtttactttgacttcttgggcaagctgagcttcttccacagatttagttacttctttcactaactcactcttcagcaagggggaactctgatgaataagttctgtatttggtatcttgtatggtttgttactaattatttcaagtctgattgtatcagaatggcaacgtgaggcctgtatggatattcttacctagcatagagaagaaaatacatattactaaatcacattatttattccttacatttaaaatattaataatacttaatagaaacacagacttacggttacatggtcaaacaaatggaacgtaacagattccccatctgttgtagtagaggtaattttgttttgaaatcgttgaagggatcctggtttccattcagaacagctatctgggccacatgagatgactaaaccatctttattttttagataagcagcacctttaatcccaaacctatattatgaccagaatataaatccagagacaatgtattcttagtacacagatcttgtatgcttatctagaatactagtttttctcctagattaaaaacaaatcacttttcctgtggtttacctccacgtatttatttcaccttagcagatggaaacaaagtattttgctggataagaaagaccctaaaatggatatagaagtgtgtgtgtatatatatacacacacacacacacacacacacacacactccagtcttcactttttttttttttttttgagacagagtcttgctctgtcgcccaggctggagtgcagtggcacgatcttggctcactgcaacctctgcttcccgggttcaagtgattctcctgcctcagcctcccaggtagctgggatttcaggcatgcgtcaccatgcccggctaatttttgtacttttagtagagacggggtttcaccatgttggccaggctggtctcgaactcctgacctcaggtgatccgcccaccttggcctcccaaagtgctgggattataggcgtgagccacccctggcctccaatcttcacatttatatactgaattatacattacattatgtacatatgataactagttgcttaaatattttaataaattatatctaatgtacagtttgtgttctacacttttaactatgatttcttatgcaccattgcattagatgtaacataccttggtataaatagaagcacaccatttgttctaattgaataaataactccgtcagatatgcaacgctcctcggtggcagggtctttgtctttgaagtacatgcactggaagagctcagtagactgcttctgagaatgctgtgctgcctgtaagaagcacaactccaaagcattttaacactcccctggcattccccaaagaaacgaaattcatattcattcaaatgtgagattctgtaaaactattaatataaaaattgttctctactatgaaattaaattactttttgtgggaacttaaccatctagtattatctcctcaaaaatgtcttagaaaatgaattattttataaaatgaaacccatttatagttcatgaaattagagatcagcaaatttgggtcatgttcaccttgggtacaggaaaagtattacacatgtcttacttgcatttctttttttttttgagatatggagtctcactctgtcacccaggctggagtacagtggtgcaatctcggctcactgcaagctctacctcctgggttcacgtcattctcctgcctcagcctctggagtagctgggactacaggcgcctgccatcacgcccgggtaattttttgtatttttagtagaaatggggtttcactgtgttagccaggatggtcttgatctcctgacctcgtgatccgcctgcctcggcctcccaaagtgctgggattacaggcatgagccaccgcgcccggccagcctttctttcttttcaagcctgtccaatgaaaaccctattggtggaagtctaaattagcactactgataaggaagacaatttagtaatatgtattaaagtttctttgtcttctttttgagatggagtctcactctatcgcctaggctggagtgcaatggcgcgatcttggctccctgcaacctctgcctcccgggttcaagtgattctcctgcctcagccgcccgattagctgggattacaggcatgcaccaccatgcctggctaatttttgtatttttagtagtaacggggtttcaccatgttggccaggctgctctggaactcctgaactcaggtgatccaccggcctcgacctcgaaaagtgctaggattacagtcgtgagccactgcacctgacctatcagtttcatttgtgcatgcacaccttttggctcagcaattccatttctaggaatttttccaggaaatcatctgaaatgtctgtataagtgtatccataaggatggttataaatttgattgcttagaacagtgctgcccaacagaactttctgcaatgatagaaatgctctctatctgtgttgcctaatatgtagccactaaccacaagtggcca

SEQ ID NO: 97089 - DNA, 12939 bp, Homo sapiens
tgcagcgcctcctgctggtgcacggccgctggtcctacgtgcggatctgcaagttcctgcgctacttcttctacaagagcatggccagcatgatggtgcaggtctggtttgcctgctacaacggcttcaccggccaggtgcgtcccccaccctggctgccccatgaccagggcctctggggatgccctgcccctcccatagctgccaggagcagccctggacgcactgagaaccctgggatcctcggtggacagggcttgcctgaggccacatggcaaggctgcgttagtggaggcctagagtccaggtgaagggaggtgacggtccctgtctagctctgtgcccaacaccttccaggatatttgtttcgttttgttttgttttgagacagagtctcactctgtcacccaggctggagtgcaatggcacgatctcggctcactgcagcctccgcctcccgggttcaagtgattctcttgcctccacctcccaagtagctgggattacaggcgtgtaccatcacgcctggctaatttttgtatttttagcagagacagggtttcaccatgttggccaggctggtctcgaactcctgacctcaggtgacctgctcactttggcctcccaaagtgctgggattacagcgtgagccaccgtgcccggcacactcagagctttcaagcaagggcaggcactgcacatggacctcctcttctggggagagttgagtgaacaagaccttgaaccccagagaagatccgattgtgggagctggggctctggtcaagactctgagcggtatcctgacaaggactagaggagccccagggcagtgctattccctgcgtgtagggaaactgctgggaagcaggtgccttggagaaggaatgagctcccatcactaatacctgggcatttgagagggagctttacagaaaccccttagtaagtatatattggtttctgttttatttttattattattaccttttgagacagagtctcactctgttgcccaggctgtcgtgcagtggcatgatcttggctcactgcaacctctgcctcccgggttcaagtgatcctcctgcctcagcccctctagtggctgagattacaggcacctgccaccatgcctggctaatttttatatttttagtagagacagggttttgccatgttggccaggctggtctcgaactcctgacctcgtgatctgcccatctcagcctcccaaagtgctgggattacaggcatgagcaatcgcacccagcgtttttttttttttttagacagagtttcacacttgttgcccaggctggagtgcaatagtgtgatctcggctcactgcaacctccgtctcctgggttcaagcgattctcctgtctcagcctcccaagtagctgggattacaggcgcctgctaccacgcccagctactttttatatttttagtagagatggggtttcaccgtattggccaggctagtatcaaactcctgacctcaagtgatctgcccgcctcggccttccaaagtgctgagattataggcgtgagccaccgtgcccagcctgtatccttttttgatgccatccaattaaaacaaaaactcagaggtgccattatgagggaatttgatcatgctttcctccctccctttatcttgccgcctttatcaggccgcacttcaccccaccccagtcccagccccaaccttgagtgtaactcgaccagagttacctcacccagaaccctccctgggtgcctgcttggcaggctccttgggtgcctggaggctgacttgttctccttgcccttctcccccggctcagcccctgtatgaaggatggttcctggctcttttcaacctcctgtacagcaccctgccagttctctacattgggctctttgagcaggtgagcagggcaaggccgggtcttccttccaggtctctgcttagcctctcctcctctcctccgctccttggggcggggagagggagcctgggagaccttcaggccatggggtggggctcagggggtgcagtccagtacctctccctgcccactgccattgaccttctcccaccggagcctacgctcatcccggggccatccagctcctcctgtgtgtgggagcccccaccctgtgctggagcccccgtgcctctgtctacccatccatgcaatggggagagaggatcagagcagatgactctgctaggtttatcatcccccagctccaagaggccccggctacgtgatctggggttgggagggtgggtcacatggaacgttccagatgatggaagtgtcccacagctatgcaatccaacacagaagccagcagccatacgtgcccatgaggaacgcttgtgttgcggctggtgtgacccagggactggattttacatctcatttcatgtttgctagaatcttttttttttttttttgagacagggtctcactctgtcgcccaggctggagtgcagtggcacaatctcagctcactgcaacctctgcctcccgggttcaagcgattctcctgcctcagcctcctgagtagctgggattacaggcgtgcaccaccatgcccggctaatttttttatttttagtagagacaggatttcgccatgttggccaggctggtcttgaactcctgacctcaggtgatcctcccacctcggcctccccaagtgctgggattacaggcgtgagccaccgcacctggccttgctggtatctttaactgtggtggaatacaaatcacgtaaactgccccgtctcagccagactcatgcgcacagcccagcatcacctagtgcgttcgtgtggccaagtgaccaacctccagagctctttccatttcattttattttattctgtagacgaggtcccattctctcacccaggctggagtgcagtggtgcgatcacagctcactgcagcctccactcctgggctcaaatgatcctcctgcctcagccgcccaagtagatgggattacaggtgcgcaccaccacacccagctcctttaaaaggtttttttggagatggggggtttcactatgttgtccaggctggtctcaaactcctggccttaagcgatcctcccaccttgacctcctaaagtgctgagattacaggcgtgtgccaccgtgcctggccttactttattttaactcacttaaactcaaagagccacacacagagagtggccaccctactggcctgcccgaggagatcctgatctctgttgggtgtcccccgccccccacccaatcccaagagcttctgcttgccccaaggacgtgagcgcagagcagagcctggagaagccggagctgtacgtggtggggcagaaggacgagctcttcaactactgggtcttcgtccaagccatcgcccatggtgtgaccacctctctggtcaacttcttcatgacactgtggatcagccgcgacacggcgggacccgccagcttcagcgaccaccagtcctttgcggtcgtggtggccctgtcttgcctgctgtccatcaccatggaggtgggcaaggtcctcacctccccggggccttggacatggcctatggaggcctcctcccctggggacccctgctttgggggcattgccaggtgcccttcctggaccccaggggctggtgtcctggtgcaagccccgctaggccccggatttaccccaccgctgcctgtccaggtcattcttatcatcaagtactggaccgccctgtgcgtggcgaccatcctcctcagccttggtttctacgccatcatgactaccaccacccagagcttctggctcttcagagtatcccccacgaccttcccgtttctgtgtgagcccccatggggaagtgggacgggcggtcgtggtgcaggggagccccgatggaagaggttgcaggttgctcatgacagtcgtccggcaaagtgtcctggggaaggcgctcctttatggaccaggcacaaaggcaccaaggcgctccctagcctgggggcatccttggagctgggggtaggctctgctgtgaccccgccctgtccccagatgccgacctcagcgtgatgtcctctccctccatcctgctggtggtcctgctgagtgtgtccataaacaccttccctgtcctggccctccgagtcatcttcccagccctcaaggagctacgtgccaaggtgaggtgggcctgggcctggggtcctcatctggtacattccaggaccctggttggggagccgtgcagggcgtagggactgcaaggtgtcccggcccctctcggccctccaagacactaggcttgggggaagggtgggtgcggagccccggacacacgcccagtgcccccggggcccgatttcccaagaagggagacctcactcccccgacaaagcagcagagagcacccaaacgccgccctggattccagtgctgatgccatcgggctcttaaggttttatttatttatttatttttactttttgagaagggtcttgtgctgtcacccaggctggagtgcagtggcacaatctcggctcactgcagcctcgaccttccgggctcaaaggatcctcccacctcagctttccaagtagctgagaccacgggcatgtaccaccacgcccagctaattttgtagttattttctagagatggagactcattatggtgcccaggctggttcaaactcctgggctcacgcaatcctcctgccttggcctcataacatgttgggatttcaggcatgagccacactgtgcctggctgacaccatcagattctaccgtgaatgatctagagcttgggggttgagatgacggaaacaaccttgaaatggtttaggcaaaaggaggaacttagaaataagagtctgttgacagatgagtgggtcaacacggcacgctccatctgtgcaatgaaacacgcctgagccgtgagaaggagtgaggctctgacacaggccacagcgtggatgcaccttgaggacatgtgctcaaggccaggcgcagcggttcacacctgtaatcccagcactttgagaggctgaagcaggtggcttgcttgagcctgggaggttgaggctgcagtgagctatgatttttgccactgcactcctatctgggcaacagagcaagaccccacctcaaaaaaaagggaggggacttactagcccacgtaaccaaagcatgcatggaaaagcaggttgcagctgagatgggccccagaattgactggaatggtgtacctgccctgccacctctgttctccctgcccagctcctgccacctttactgcacaggctgggcacctggctgtcccaggctcacctctcctggatttgccaccaaagggcagccaaggcacctggtggctggtccagagtcggggaaggactctgattggctgagccagggttaagtcccagggaaggactctgattgggtggtcccgagttaagtcccagggaataactctgattggctgatccagggttagtttccagggcaaggccaattagtgggtcttgaaaagcaaaggactagagtcctccttagaactcaacactgagagtcgaggactctaattggctcaacttgggtagggaagaacgtagccaatcaatagtggccaagggctttgaatcctgcctctcctacttgggggacctgagagccatcagccaagcataggagtctgcttcccctgctctcccctttgctcttcaggaggagaaggtggaggagggccccagcgaggagattttcaccatggagcccttgcctcatgtacaccgggagtctcgtgcccgccgttccagctatgctttctcccaccgtgagggatatgcaaacctcatcactcagggcacaattctgcggaggggaccaggggtcagcagtgacatagcatctgaatccctagacccatctgatgaagaggcagcttcgagcccaaaagagtcacagtgacacctcaggaagatgtccttcctggggaagaagaagcaccagccacaggggcaggtgtcctcccaggaagtacagctcccccctacacctagctcatcattttctatggatagacaatccgctcttcatccagaaaaccaacctgccctccccaaatatgtgctcaccagcagcaacaggctatctgagtctttccaagagcaattgccaagggcacaggagaggtcaytgtcacccaagcagaggccaccttctcctgagaagttgctgttgaccaaggagaggtcacattcttttcaggagaaatcactgttgcacagagaaagccagctgtcgtcatttgagagccagccacagcctctggggagccagtcatttctttcaggccagctgacgttggagagccagccagactcctcggaggagaagtcagcatttttgaagccctccacaccgttccggaagagctggcaaaaggagcctcacacccccaaggaggggacggtgccacttccagacaagacccacaaatctcaggtggagactctgccaccaagtctggaagaatcgtccacgtccacgagcgagcagcctatggaggtggagctgtggcccgcggagaagcagtcatcatcatccatggagtggctgctggtgcccggggaggagcagctatccttgcccccagaggagcagtcattgccctctgcggaggggaccagggttcagcagtgacgtagcatctgaatccctagacccatctgatgaagaggcatcttcgagcccaaaggagtcacgctggcatatcaggaagatgtccttcctgggaagaagaagytccagccagttctgctgcaagtcaaccagcatgcagggggccttcctctaaagacaaggactccacatgcttttctttttctaataaaccagggtccatctgaccccagcgctaattcaggctccctctttccctacactttttttgtgatggaatattccttcccggtttttaaaatcaaaacactgacctctagtggtccagccgggtatttgcagggaaaactttccttcttcatgctggggtaagataatgtgggtaaagcttcattgctctcaaaagttgcttattaaaagctgtggctcccccactgcctgacagctggcccctcccaagaaagtttataaattccagttcttgtaccatctagcttcttcctctatcgggaagccctggtttctcccattcaaatacaccttcattcactggggcctccgttcactttagactccagaaagcaatgagcagtgatgtcacagaagcaggtcctgacaaggtgtgcatcttggggcttggttgactcaaaggcgccaagcttttccttttaaggcgccaagcttttctttctgattctttttttttttttttttttttttttttgagacggagtctcactctgttgcccaggctggagtgcagtggcgcgatctcggctcactgcaagctccaccttccgggttcacagcattctcctgcctcagcctcctgagtagctgggaatacaggcgcccaccaccatgcctggctaattttttgtattttttagtagagacggggtttcaccgtgttagccaggatggtcttgatctcctgacctcgtgatccgcctgccttggcctcccaaagtgctgggattacaggtgtgagccaccgcgcctggcctctttctgattcttaccattccctgtgggtggtggacttgtgtgggtggtggagttgtgtggattgtggaggctcagagctggccactggcccaggaagaagacgggactcagagcagagaggggcgagctgggtggaagcaaagtccgtcttccctgcactccggtcctccctccccagcctcgaggtgggcgagttccattcccgccccctatctgtgcccgacccgtcagctaacacacacgcccaggtgagtgactagaaaataatttattgaagaaaaacaaatcaacaaacccagcacagcaatggttaacaatgacgagatttttttttttttttttttagcttttaagcctgtcgcccaagggtgaaggtggaaaagggcttctctcccctgtccctggaggggaggggactttggagggtccaagtggtgtctcccctgaaagcagccctcagttccagtctattcaaaacactcaaggccgcagggcctcctggctcttccgtcacccccggctgagctcattccaccaaaaccagcccctgcgtggtctgacagggccacgaggaggagccccaggagtctactggcctgattttgcttaaaccgcttggggcagagaatgtgaaatggcccaagctcctgctggtgcaaggagcatcctggccccggcatcatttcagatttgaggtcagctgagccctcagccccaggcccagccctccagaccagggctttctgctttatggggtgagaagcaccccgtttagctaccccgcccccccctactggggcctgtcccaaaagcggcccctctcatctctcccctgccgccctctcctccagcctctgttcccaagctggcacatctgtgcccctttccacctccagggactatctggggatggctcagggacgtggcctcatggcacaagaggagtcagaggcagaggacattgtcccagagccccctttgatgattttggggagtcctctgttctgtaggctccgaaagtgggctgggagggaggggtctctgcaggcgtacaccccctgcctcccgggctggacagaaaggcggactcatgcccagcccagggagggaggccgaggctgtctgggtggaggtggggggggagggggtgctggtgcctgctgttggggccctcaggagggtccttcagatctcaggaagttggggcacactcccgtcccccaccaccctgggcaacaagacaagaataggctgattgtctgtctcctctgaacaagacacttgggaattcatgctagagtgaaagcaaccgggtgatggggggttgggggggtctaagatatcgatgacaccagagtgcccccaagaaccaggaactgagggggggacgctcggtggctcccgcctggctggggcaggcaggtggcatctcgggtggagatggacaggcaggtggaggagacccggctactgaggctctgttcccgccccctctacctggggccccgtccacctgtcccggctggacacagttccttagaaaggaggaaagaaacagtaacgaaaaaccactgaacagcaccgatcaggcaccagacacacagatgcgacacggaaccgggccacgccccccgccccccaccctgaccactttattacaattagcgtcaagaaagagtacattagtcatgcaccaactcaaattccattttgtcttttttttttgcatttttcttcctttttttttcttaaattacatttgaacacagaacacagagaataataaatactcttataagacatgactccagaaaacaagaaacagaacaagccagagaacagaaaggtatacctctgcctctctctctccctctccctctctctccctctctctctctcttgctctcgctctctctctctcttcctttctttcctaaaggactcatttaaataagaaatctgtaaacgccactggtcctttctgccgcagtctctctcgcgatcacgctccctctaactttccctctggtctccagccctgacattcaatgcgtctcccacggaactcgtcaaagaaacgacatgccatcgtctgcaaaattataatttaacggtataaagcttcaagtcacgtattccaaaaactagctaaggatttttttttaatcacataaactatacattaaatattttgaggtatttcagagaaaattgtcaaaggctcgaaggaattgtgctggaggtgttgatccctgcatggagaacgcatgctctttggtatgtgacagccaagtgggcatgcggggaggcaggagagggcctgaggggccggcgggcaggtcggggatagagccttctgtgggggtctggccaagtttggggtggggtccggaaacaggtaggggtgtgtgtgtgtgtgtgtgtgtatgtgtgtgtgtgtgtgtgtgtgtgtgtgatacgaagatatctgaaaaggatccaggagtcctgggccactttatttatttttttttgtagaagtggggtcttgctgtgttgcccaggctggtctcaaactcctggcctcaagcgatcctcctgtctcggcctcccaaagtgctgctgggccacttctgtgaccaagaggcttgacctgatctgaccacagttcagcatagctaaaacattccacaaccagaacgatcccaagccaagtcctaaatttccagcaggggacaaaactggaggccccctagcgtgttacccttggggccttgaaggccaagcagagggcatctaggagacccagcaccccgccaggcccgtgctccggccagtgcctgaagcccaggcatcgattttctaagaagctcactgggccagggctgcagcgtgattctcttggatcagaagcattttattgcctttgagagcctcttcctccactaaatgtctatctacctgtaatcctagcacttttggaggccgaggcaggaggacccccttggggccaggagttcaagaccagcctgggcagcatagtgagaccccatatctacaagaaatcccttaaaaaattaaatgggcatggtggtgtgtgcttgtggccccagctactgggaggctgaggcaggaggatcacttgagcccaggtggtcgaggctgcagtgagctacgattgcaccactgcactccagcctgggtaacagagcaaaaccctgtttctaaaaaagaaatttaaaacattgtatatctataggctaccttggtataaagacaaataatatggtatgttgaatgggctgcatcttcttggacctaaagtttttttttttttttttttttttgagagggagttttgctctcgttgcccaggctagagtgtagtggcgcaatctcggctcactgcaacctctgccttccagtttcaagagattctcctgcctcagcctcccaggtagctgggattacaggtgcctgccaccacgcccagctaatttttttgtatttttagtagagacagggtttcaccatgttggtcaggctggtcttgaactgctgaccttgtgatccacccgcctcggcctcccaaaatgctgggattccaggcgtgaaccaccgcgcccggcaagacctaaagctttttaaaaagaaattaaaacgtgggccctggacctgctgggcccataggctacgtcagtccggcctggagtggacaggacagctctaggttcatccatcaggaatttaggggtggggacgggagagaaattaaggcccaggttttagtgggaggtgggagataccgagttgctggcacccagtgacaccacagaaaaacggggccagtgtgtgtatgtgtgtgtgcatgtgtatctgcatgtgtgtctctgcgtgtgcctgcatgcgtgtctttgcatgtgtgcatgtgtgcctgcgtgtctgcatgtctctgcatgtgtgtgcacgtgtgtgtgcatgggcctgcatgtgagtgcctgcatgtgtgtgtctgcgtgttgtctgcatgtgtgtgtctgcatgtgtgtctgtgggggggtagagaggtgcggtgctgagcaggaatggggaccctttctactattgggaaccccccaacacccaaatgttctagaagcatcactcagatccggtcgcttggaaagctgggagcagagcaagtcgataaggacaagagaacactccatacacgtctttggttcaagaagaaggcactcatcgacctcacgatcctctccctccctctctccctttctctccctctctctccctctctctctctctctctttcgctctcaggttcgggaaggggtggcactcggcaggcggggccccgagccgggtcccaggccagggaatcctgtcatccagcacaaatccttgggagaaatctttggtatcaggcgtgattttccaatcacagacatgagcttgagtgaggtagcctttacctgggggaggggaggggcatttcactagaaatgtcttttgcattttcaaggggggtaggggggccgcctcctccctgggaggcagccgatgagtggggggatttcagggaggaggttccttctggactcggatcttgaacccccggaggaggcgggctcctgggatcccgcggccggccagtctcggaggtcacccagaccagatgagaggagcgggggagagcgcggggtgggaggggggcgctcatcttcatttccgacccttcccatttgtaaatatttttggcaaaaaatggagcaagcggaatccaccttcctcggcgtcttctctctttggcgagagtggaaaccaacaccacgttcaaccccgctgcccccctgcaagcccagttcagaccctgacgcgggcggaaaggggggcggtggattccagaaggttccacgcaggaagcgtctccacgggcccgtgcagaggggctcctccgggcggccccagcggcgccttctccggccgggtccccttctcctgggagcctgggcgtggtctcccgtgtccggagctgcgtccttccttgcgctccacgaaggtgcctaaaggtaaagtgaactcaacagacggggcggggcgggggcgtctggaatttacccgcacgtgggagccccccgtcccctgcggcctgggatggggtgggaagggtgctcgcccgtaggtgctgggcgcccgccgcaggcccctccccagactttaaggcaggcgattcttggcacgaggaatcctg

SEQ ID NO: 97090 - DNA, 226837 bp, Homo sapiens
  misc_feature (1)...(226837): n = A,T,C or G
tttaatcgtcatggttttatgtaaaataaaacagcacgtggaaggtattgtaagcgctgtaagtttttgctctggtggtggttttaattttttaattaattaattaatttatttatttattttgagacggagtctcgcactgtcgcccaggcttgagtgcagtggcatgatctcggctcactgcaagctccgcctcccgggttcatgccattctcctgcctcagcctcccaagtagctgggactacaggcacccgccaccacgcccggctaattttttttgtatttttagtagcgacgcggtttcacgtgttaaccgggatggagtgtttatttttaataccccctgtagtcgactactagattcacaccgctaaaacttctattttattttttgagccatgtattttccaggagagccaagacaactcagcaagctcgagggtaaaaaacagtaaaacaggagttggaatttggctttgaggactttccacatgagttctcaaccaaaaatgacagtatttaagggctgtctgcaattccctaccccgctaagacaatgggctggggaaaatttagccaaacttttctggagatcataatgtcttcccattcatttctggctttttgttgcatttgcaggttaaaagttcttcatttctactagcctgtttagactaagtggtcacattaaattggcagctgttttacctttttgctagtgttttcattggcataaatattataattaaaatcatgagtgtattggccgggcgcagtgtctcatgcctgtaatcccagcgctttgggaggccgaggcgggaggatcacccgagcgcacacggagacacacacacaaacacacacacacacacacacacacacactgggcgtggtggctcatgcctgtaatgccagcactttgggaatcagaggcaagaggatcacttgagcccaggagttccggaccagtctgggcagcataaggagaatcctcatctctacaaaaatgaaaaaaattagcctggcatggtggcacatgcctgtagtctcagctacttgaaaggctgaggtgggaggatcacttgggcctggaaggtcaagcttgaagtgagccctgattgcactactgcactccagcctgggcgacagagcaaggcctttttacaaaaacaaaacaaaacctcataagtgtattgatttacattccatttagattgtcgtagatatcattaatttggaaagcagatgattttccagggtttttttttttaagaaaaagtcaaaatactctgtgaatgtttattaattgtgggtacaagttttgtttctttgtaaaactccactacatttaataataattgtaaggtatcaaagtcatttacctgtttatttattcagtccctgtgttagggttctccagagacagaaccaataggatagataacagatagatatagatacagatctatgaggagatttattagggaattggctcaggaaattatggagactgaaaagacccatgacaggccatctgcaagcaggagaccctggaatgctggtagctggctcagtccaagttgtgaaatcttcaagtctcaaggtggagggcctggagttctgatgtctgggagcagaagtctgagaagagtgtctcagctccagaaggaagaaatattttttctcaccttttttgttctgggtccttggttaattggatggtgcccgctcacattgagagcagatctgccccactcagtccactgactcacatgccagtctcctttggaaataccctcaaaggcacccagaagcaatgctttacaagttatctaggtatttctttttctttttcttttttttttctttttctttttttgagatggagtttcctcttgttgcccaggctggagtgcaatagtgcaatcttggctcaccacaacctccgcctcccgggttcaagcgattttcctgccttagcttcccgagtagctgggattacaggcatgtgccaccatgcgcggctaattttgtatttgtagtagagatggggtttctccatgttggtcaggctggtctcaaactcccgactttaggtgatcctcccgcctcggcctcccaaagtgctgggattacaagccctctaggtatttcttaatctggtcaagttgacacctaaaattaaccataacagtctccataactaaaacattaagtgcttgaaggcagagactatgacttaagttttttcatataatataatttagtatgtcatacatgttatgataaatacgtcctccagaataacataggtggctgggtaccgtagcccacaccggtaatctcagcattttgggaggctgaggtgggaggattggttgaactcggaaattcgagaccagtctgggcaatatcaggagaccctgtctctacaaaaaaaacctaaaaattagctaggtgtggtggcaagctcctgtgttcccagctacttggaagaggatcacctgagctcaggaggcgaggctgcagtaaactgtgatcacaccactgcactctagcctgcgtgacagagtgagaccctgtctcaaaaaaagaaaaaggcattcttttctcataagtcatatgttaattatgatgtaattataatgcaatttattattactgtcatttgttaaattacatttctgcctgagcaatgcaagcacacccatttagcaagacttaaagatctcttttttcttttcttttcttttttttttttttttagacattcttgctccatcacccaggctggagtgcaatggcatgatctgggctcactgcaacctccacctcccaggttccagtgattctcctgcctcagcctcccaagtagctgggattacaggcaccagccatcatgcctggctagtttttgtatttttgtagagatggggtttcaccattttggccaggctggtctcgaactcctgacctcagttgatctacctgcctctgcctcccaaattgctgggattataagcatgagccactgcgccggccaagattttctttggtataaatgtaggcaggccagttgcagtggctcacacctgtaatcccagcactttgggaggccgaggcaggcagatcacctgaggtcaggagttcaagaccagcctggccagcatggtaaaaccctgtctctactgaaaatacaaaagttagctggatgtggtggcacatacctgtaatcccagctacatgggcggctgaggcatgagaattgcttgaaccgggagacagaggttgcattgagctgagatcgtgccactgcattccagcctggatgacagagtgagactctgtctcaaaattaataaataaaataaataaatttaggcagaaattgtattgatacatactgtaacttttcttaatgccctaggcctttgaaattttcaggttcactccacaccactctctgtgttttatttcattataaaaattgtgtttaattgcttctgcaaagcaaacatttcaatgaagaacttttactaggcatcagcactttttttttttctctagcatgcattcttcattatcatcgttggtgttaaaatgacaaacatgcaaacaaaaacaaacacacaactatagtaatatgtagactgccccgggtggaaatatatatttgatactctttctggcaacttgcttggcaggtgggcaaggagaaaagactatcttattctttctgcaggaatctggaatataagttcaaattaagtaattcagacctatgtagaagccacttaaactggaaaggaaataatggcatttaagaaccactgtgctggccgggtgtggtggcttacacttgtaatcccagcactttgggaggctgaggcaggcagatcacttgaggtcaggagtttgagaccagcctggccaacatggtgaaaccctgtctctactgaaaatacaaaaattagccgagtgttttggcacgtgtctgtaatcccagctacgtgggaggctgaggcaggagaattgcttgaacccgggaggcggagattgcagtgagccgagaacacgccactgcattccaacctgggcgaagaagtgagactccatctcaaaaaaaaaaaaacacacacacaaaaaaaccactgtgcaatgagatgggccatgaggacaaaaaacaaaggaatgccctgggtcttgtggatttttccggttgatttggctgtaaccttagataccaaggttaagacaaaactacaggtaattgccaatacattttctattattgtgttaatttaacctgttgcctagattccttaaatctgtgttacagagtgcagttgttgattctgttaaagtactgagtagcctaattctaagttcgagcaattcattggagagaattaatgctgtgtttacacttctagagtagcctttcaagtgagcatttaacagaatacatcccaaagcaagttcatctgatcctgttttttgttgttgtttttagagacggagactcgccctgtcgcccaggctggagtgcagtagcgtgatctcggctcactgcaacctccgcctcccgggttcaaggaattctcctgcctcagcctccagagtagctgggactacaggcacatgccgccactcccagctaattttttattttttatttttatttttattttagtagagactgggtttcaccatgttgcccacgctggtctcgaactcctgagctcaggcaatctgcctgcctcggcctcccaaagtgctaggattacaggtgtgagccaccatgcctgaccgattctgttttatgtatggtatttagagagtgaaaatcactccccaggggtgttgtgagtaattagaaggtaagcataaagatagaaaaaaattatgaccctttatcctagagttatgctcactgtgtgacagcgatgtggtcttaccacatttggcagggtcttttcgtttcgtttcgtttcatttcatttccttgccttgccttgcctttcttttcttttttcttttcttttctttctttcttttcttttctttctttctttcttttttttttttgagacaggatctcgctctgtcgcccaggctggagtgcatggtgtgattatggctcactgcaacctctccctcctaggcacaagcaatctcccgtctcctgaactcaagccatcctcccacctcagcctcccgagtagttgggattacaggaacatgccactgcacccggctaatttttgtatattttttgtagagacgggtttcaccgtgttggtcaggctggtctcgacctcctggggtcaagcgatctgcccgcctcggcctctcaaagtgctgggattacagccatgagtccccgctcctggcagatttggcagattatttaggagctctgacaccattcggttctcaagaagacgttttattagtttctttttatgtgtgtatgtatatacaatccccctagtttttgtttagtctcacatcatcctaaagacatttaaaaaaacccttgtaaacaagttgtattagcttccttttccccattccatagaattgttttagtatggatgctgtacaaagagttcatgcctgggggactaaaggaaagttctcaagttcttttaattttgatttgcatcaaaaagtccgcttaatttcaggtttcacctccaggagtcaatcattatggacttaaagctatagtaacttttgaagatcgtttgtaattcgctgtctttgctaggttttcttttctaagcaggctcatttctgtagttcagaaacttagcacccactagtcgggtacccctggagagtcctggtaccgcccacctggggcgcctacgaatcctaggcctttgcgtgttgatggacggattcgcgctgcaagaagcctcgccgctgtcaccactgggcattggcaattggttcagggggaacggcgcggaaccaatgggagcggtggctcgggagagaccttggagcgcgcgggaaagagaccaatataaactgtggcgggatagttttcgggtccttgtccagtgaaacaccctcggctgggaagtcagttcgttctctcctctcctctcttcttgtttgaacatggtgcggactaaagcagacagtgttccaggcacttacagaaaaggtgaggcgatcgagtgtggtactggagggcgggggggtcctcccggcagcctggccacgggcgacagacgccagaggtccccctgggccctgtgcgccaaactcatctagctagccagggagtagccgcctggcccctttacctagaagaggaagtcgcaggggcagggtaaggttatcctgctgttctggatcgccaggctctcctctccaagctgctggggtccaggactcggtgtcggaaccctcctgccccttctgaacacccttttttgcctctcttcacagtggtggctgctcgagcccccagaaaggtgcttggttcttccacctctgccactaattcgacatcagtttcatcgaggaaaggtaagaagagccctcctaaagttaggggatcagtcctggcacctgcaagcccctggcttgccatgaatttctttttcttgaggtactcacgcccgaatttcttccttgccctgtgatataataagagaggctgggccttttggccggctagggtagaggtgggggggaggtctcatggaagggaatttcaagccttggagttaaggaccgacacaccttatcttcaagcctatttttcttttcttttctttttttagacagggcctctctttgttgctcaggttggagtgcagtggtgcaatcactggtcactacatcctccacttatggggcttaagcaatcctcccacctcagcctccaaagtagctggggctacaggtacatgccaccacgccgggcttttttttctattttttgtagagatgggggtctcactatgttgcctaagctggtctcaaactcctgggctcaaacaatcctcctactgggattacaggcatgagccaccacagccagcctatcaatttttgttttttggtttagtattttcctttttctttctttttctttttttgagacagagtcttgcactgttgcccaggctgcagtgcaacggtgtgatcttggttcactgcaacctccgcctctcgggttcacacgattctcctgcctctgcctcctgagtagctgggattacaggtgcacgccaccacacccagctaatttttttgtatttttagtagagatggggtttcactatgttggccagactgatctcaaactcctgacctcatgatctgcctgcctcagcttcccaaagtgatgggaacacagacatgatccaccacgcccagctattatttttcttaataataacagaggctatttaaatattgttagaggctatttaaaagcccccttagtagattaagggtttgaacaatcgttaacagtgctgagtgctcattgcaatgtctactaaactttaataaaaattttttttgtttttgtttgcttgtttttcctttcttccttactcttttttgtttgtttgtttgtttgagtatgatgtctgtgggttttctccaactttgcagctcctaatactgtctttgggagagtaggagtgaaacccggcaaaggaaatagcttcatgctgctccttctgtgcgtggagtagatgagaaaatgccctgccatctggtgcctcattcctttcagtaggaaatttggcagacagggagattaacgctacaagatttaattaagaacataaaggtgaacactgtttaggacttcatgggttttaaagtcaattcaaatttctccctattagaaacatttcattagaaaacatttactatttctatctcttcagataaaaggaaatagaagttgatgaatttttttagagtaacttataccctgtaccactagactaagtttctttttcttttcttttttcttttttttttttgagacagggtctcactctgttgcccaggcttgagtgcagtggtgcaatcacagcttactgcagatttgaccccagggttcaaatgatcctcccacttcaggctcttcccaagtagctgggactgtaggcgcatgccaccacacgcccgcctaatttttgtgttttttgtagagatggggtttcatcacattgcccaggctggtctcgaactcctgggctgaagcaatcctcccgcctcagcctaccaaagtgctgggattacagacgtgagccaccacgcctggcctgatgaaatttcattagagccgcatctcatcgtctggtccactgttgaatcaccagagccaactaaataggcccttactgaatatatgttgaataaatgcatcctttaaggcattttaaaaatctctatttttaatccgaataattggatgtatgaaatgggtaatatccttattttaaagataaggaaatttaatatcttgttatataacttgataaaggtcacacaactaaatcagtggagttgggtttgaacctgttgctgctatatttttttttttttctgagacacagtctcgctctgtcacccaggctggagtgcagtggcatgaactcggctcactgcaacctccgcctcccgggttcaagcaattcttctgcctcagcctcctaagtagctgggattacaggcatgcgccaccatgcctggctaaattttgtatctttagtggaggcagggtttcaccatgttggccaggctgttctcaaatgcctgacctcatgatccaactgcctcggcctcacaaagtgctgggattacaggcgtgagtcactgcgcccagctgctgctgtatgttttctagtagtaaaagcattcctgtaaggttcctttgggaaaactgtgaaccaaaagatcactatcttttatatgccattccttcttttggaggcgaaggcgggacggttgcctcagccaggagtttgagaccagcctggacaacgtggcaaaaccccattgctatttttataaatgtaaataaataagtagaaacaatataacttcagagtctatatggaaacaacttttgtaagcattctttaacaactagagttgttaaagcaaatgttttagcttaaagcaaaagatttgcagtaactgaataatttgttcctggtcattactttataaaaaggcaagaattttccctcaatttctccttatattactgttgaaaaataaccaggaattggccgggcagggtggctcacacttgtaatcccagcactttgggaggccaaggcgggcggatcatgaggtcaggagatcgagaccatcctagcatggtgaaaccctgtctctactaaaagtacaaaaaattagccaggtgtggtggcgggcgcctgtagtcccaactgctcgggaggctgaggcaggagaatggcatgaacccgggaggcggagcttgcagtgagccaagatcgtgccactgcactgcagcctgggtgacagagtgagactctgtctcccccccaaaaaaacaaaaacaaaacaaaaattagctgggcgtggtggcgggcgcctgtaatccctgctactcgggaggctgaggcaggagaatcacttgaatccgggaggcagaggttacagtaagccaagattgcgccactgcactccagcctgggtgacagagctagactctgaaaaaaaaaaaaaaaaaaaaaaaaacaccaggaattggacttctcttatgaactgaaaaggagccaggtgctttgaaaaatggaatctacttttgtggagactttcacattgcctcttatatgtgctttaactaaatgaccttagtaagtaaaatgttggcactttatactacatggtcctatcttatgttaggaaaaagtgtgtcaaacttcagtatgtcagtacatacaagaatatatatatatatatatatatatatatatatatatatatatatatatatttttttttttttttttttgagacagagtctcgctctgttgccagactggagtgtgcagtggcggcgcaatcttggctcactgcaacctccgactcgctggttcaagtgattctcctgcctcagcctcccaagtagctgggaatacaggcacgtgccgccacacccagctaatttttgtatttttagtagagacgggggtttcaccatgttgtccaggttggtctcgaactcctgaccttgtgatccaccctcctcagcctcccaaagtgctgggattacaggcgtgagccactggacccggcaagagtatttgaatagctctgcttgtggacaaaatataaaaatatttttcagttgtaaaaattctgttactactgttattgctaagataaccatcacactgagtttattggtggaatacagctttattgtgtcacattttctaattctttaagttgtatatcttaaataaagattatttaatacctttgagaatttgatgttaaagaaggaattaagttgtttaaggaatagagattgtattattagcacttatctagttccatctgtttatattttacagctgaaaataaatatgcaggagggaaccccgtttgcgtgcgcccaactcccaagtggcaaaaaggaattggagaattctttaggttgtcccctaaagattctgaaaaagagaatcagattcctgaagaggcaggaagcagtggcttaggaaaagcaaagagaaagtaagtttttatattctggaatataaagaaaatatttatctcacgcctgtaatcccagcactttgggaggccgaggcgggaggatcacttgaggccaggagttcaaaaccagcctgtccaacatggtggaaccctgtctctactaaaaatacaaaattagctcggcgtgctggtgcacacctgttgtcctagctatttgggaggctcaaacaaaagaattgcttggtgcagcaaaccaccatgcacacatatacctatataacaaacttgcatgtaatgcacatgtatctcattttcacgccactgccctccagtctgggggacagagtgagactctgtctcaaataaaaaattaattaattaattaataaagaaaatatcttgaaaataaaggacaaataggatattgagtcaagtttctcttcaagctcataagaaaatgcaaaaaaagtttttaaaaacttcttctaatttcttattataactcactcccaaatttcttttcttttttttttcctgagacggagtcttgctctgttgcccaggctagagggcagtggcgctatctcagctcactgcaacctccgcctcccaggttcaagcaattttcctgcctcagcctcccaagtagctgggattacaggcacacgccaccacgcccagctaatttttgtatttttagtagagacagggttttgccttgttggccaggctggtcttgaactcttgactttgtgatctacccaccttagcctcccaaagtactgggattacaggcgtgagccactgcatccagccagcaaatttcaaacattagtaaaaagtattctttttactcttcccaatctctcaaagaggatcagttcccattcacataagtgctatgtcattaaccatgaacttagtgtattgagtctttaattcttactgtctttttcctttaggcttttcttacaaggcaatttccttgttggcttatataacttgaattccattaatcctgtcccttaaaaaactaccagttcaacttgcacaagaaatatataaccaggctgtgtgcggtggctcatgcctgtaatcctagcactttgggaggctacagtgggcagatcgcttgagctcaggagttccagaccagcctgggcaacatggtgaaaccccttctctaccaaaagggtggcggcgccgcctataatcccagccactagggaggctgaggtgggagaattgcttgaccctgggagatgaaggttgcagtgagccgagatcccgccactgtactccagcatgggtggcagagtgaggacctgtctcaaaaataggcctggcacagtggctcacctctgtaatcccagcactttgagagtccaaggcaggcagatcacaagatcaagagatcgagaccatcctgcaacatggtgaaaccccgtctctactaaaaatacaaaaaattagccgggcgtggtggcacgtgcctgtaatctcagctactcgggaggctgaagcaggagaattgcttgaacctgaaaggtgttggttgcagtgagctgagatcgcaccactgcactccagcctgggggacagagcgagactccatctcaaaaaaaatcaagtaaaataaaaataaaaatatgaccaatatggaaaagttggaaaatatagaaatccccatcacctagaaccaactaggaataataccatggtgtattgtctttacaacttctctgtaagtacgtaagaatagtgaaaaacaaaaagtagggataaaactacacacaccaaacttggtgtgcaacctttaaaaaaaagtttccgagtttcatccgttgtatttcatgaatatctcattccttttttcctttttttctttctttcttcctttttttttttttttttgatatgggggtctcactctgtcacccaggctgtaatgcagtggcccaatgttcgctcacttcaacctctgcctcctgggttcgattgattctcccacctcagccttccaagtagctggaattacaggcatgtgccatggagttcagctaattttttgtgtttttggtagagatgaggttttgccacgttgcctaggccggtctcaaactccggagctcaagtaatccacttgccttggcctcccactgtgctgggattacaggcataagctgccacacctggccagtgtgcaaactttttttttttttgagacggagtttcgctctgttgcccaggctggagtgcagtggtgcaatctcggctcactgcaacctccacctcccgggttcacaccagtctcctccctcaccctcccaagtagctgggactacaggcgcccgccaccacgcctggctaattttgttgtatttttagtagagatgggatttcaccgtgttagccaggattgtctcaatctgacctcatgatctgcccgcctcggcctcccaaagtgctgggattacaggcgagtgcaaccacacccggccacaaactttttaagaagttaatgaaaccataccttttacatttttaatgacaggaaaatgctcacaataattgttaacccaaaattctggatacaaaagtacaatctttactgtgtaaatacatgtatatgtactatatgaaaatataccaaatatcaataatacttatctctgggtaaaaacctcttctcataccctgtgctaacaacttttaacaaaaaatttgcatcacttttaagaatcaagaaaaatttctgaaggtcatatgggacagaaaaaaaaaccaagggaaaaatcacgccacttgggaaaaaaagattcgaaatctgcctttttatagatttgtaattaataaggtccaggctttctaagcaacttaaatgttttgtttcgaaacaaagtacttgtctggatgtaggaggaaagggagtgatgtcactgccattatgatgccccttgaatataagaccctacttgctatctcccctgcaccagccaggagccacccatcctccagcacactgagcagcaagctggacacacggcacactgatccaaatgggtaaggggatggtggcgatgctcattctgggtctgctacttctggcgctgctcctacccgtgcaggtttcttcatttgttcctttaaccagtatgccggaagctactgcagccgaaaccacaaagccctccaacagtgccctacagcctacagccggtctccttgtggtcttgcttgcccttctacatctctaccattaagaggcaggtcaagaaacagctacagttctccaacccatacactaaaaccgaatccaaatggtgcctagaagttcaatgtggcaaggaaaaaaaccaggtcttcatcaaatctactaatttcactccttattaacagagaaacgcttgagagtctcaaactggactggtttaaagagcatctgaaggatttgactagatgataaatgccaatattaaatctgttggagtttcacgtataagacagaggagaaagagaacatcaaaaattacttagcaagctatggaatggagattcagttttcattttagtttgttaaatctacaaggctgtaaaatgattaggtaatagaaaaagcttccatgattctatttattatatatgtgcattggaagaaactaccaggtgttactataaatattctatgtattgtttcagccatcctaatttaatgctgatatgctctagatttacattgctaagttttcactcttctcttgggcacttaactctgtttcttttgtttgtttgttttgagaaggagtctcactcttgcccaggctggcgtgcagtggtgctatcttggctcactgcaaccttcgcctcctgggttcaagcgatttttgtgcctttcttgagtaactgggattacaggcacgtgccaccacatccagctaatttttgtatttttagtagagatgggattcaccatgttggccaggatggtcttgatctcctgaccttgtgatctgcccgcctcggcctcccaaagtgctgggattacaggcatgagccactgcgcctggccaagggcacttaactctttagggctttggatttgatttgccattgcatttgactttcttttcttttcttttctttttttgagatggagtctcgctctgtcgcccaggctggggtgcagtggcgctatctcggctcactgcaagctccgcctcctgggttcatgccattctcccgcctcagcctccccagcagctgggactacaggcgcacgccgccacgcccggctaattttttgtatttttagtagagacggggtttcaccatgttagccaggatggtcttgatctcctgaccttgtgatccacccgcctcggcctcccaaagtgctgggattacaggtgtgagccatcgcacccagccctgcattttactttctatgtggtaattgaagtgtgccagagcaatgatagactggaatttactccaaatccaagcatgactaattcttgcatatacacttaaaagtgaaatagtaggcatttcctatcacccattccaattcaacaagaatgccagatttagttacgatacttaactggattccaaaaattagaagtgcattgacttcaagtaattttaaaatagtgcctttttatctttgtgtatgtcaaataattttcacaacttaaaaactgatttttttgtgtgcaggaggtgggttaaaagttgatttcctttgaaggcgtatttgattaatcttgaaattaagaggtgactttgtacatgttgaataatttttacaacttaaaaattgaccattttttgtgcaggaggtgggttaaaaaaagttgatctgggccaggtgcggtggctaatgcctgtaatcccagcactttgggaggccaaggtgggcagatcactagaggccaggagttcgaaaccatcctggagaacatggtgaaactcggtctctactaaaaatacaaaaattagctgggtgtggtggcacacacctgtaatgccagctgctcaggaggctgaggcaggagaatcacttgaacccaggaggtggagtgagccaagattgcgccactgcactcctgcctgggtgacagagcgagactctgtctcaaaaaaaattgatctgttttgaagtcatatttgattaatcttgaaattaagcggtgggctgggcacggcggctcatgcctgtactcccagtactttgggaggcctaggccggcggatcacctgaggtcaggagtttgagactaacctggccaaaatggtgaaaccccatctgtactaaaaatacaaatattaactgggcgtggtggtgagtgcctgtaatcccagctactcaggtggctgaagcaggacaatcacttgaactcaggaggcagaggttgcagtgagctgagatcgcgctactgcactctagcctagcctgggcaacagagtgagacttcgtctcaaaaaaaaaaaagccaagtgcagtggctcacgcctgtaatcccagcactttgggaggccgaggtgggcggatcacgaggtcaggagatcaagaccatcctggctaatacagtgaaaccctgtctctactaaaaatacaaaaaattagccggggatggtggcaggcacctggagtcccagctactcgggaggctgaggcaggagaatagcgtgaactcaggaggcggagcttgcagtgagccgagattgcgctactgcactccagcctgggcgacagcgcgagactccgtctcaaaaaaaaaaaaaaaaaaagaacatgaaataagcaaaataacaaatctggttctgtatttgcaaagtgaagaccagaaatttgtctgcattaaattcacaatgcttttgtgctctttctgtaaatacttaaaaaaaaaaaaaaaaaaaaaaaaaacaactttatgagtctgagtagctacatttgggacactttctataattagtcaatatttttagatagagcctgggcctaagcataagtggacttgattctggtaagtaaaacttttacaactgccttgatgtatagaagcctttttagaaatagacactccagcctgggtgcggtggcttgtgcctgtaatcccaacattttgaaagtccaaggcaggtggatcacccaaggtcaggagttcgagaccagcctggccaacacggcgaaacccccgtctctactaaaaatacaaaaattagctgggcttggtggcaggtgcccataatccctgctactccagaggctgaggcaggagaatcacttgaactcgggaggcggaggttgcagtgagccgagatcatgccattgcactccagcctgggcaacagagcgataatccgtctgaaaaaaaaaaaaagaaatacgtactccatgaggccaggcatgcctagcactttgggagactgaagggggaggattgcttgagcccaggagtttgagaccagcttaggcatggtctctacacacacacaaaaaaaaaaaaaaattaggtgggcatggtggcgcacacctgtagtcctgactactctggaggttaaggtgggagtcgcttgagcccaggcattcgaggctgcagtgagttatgattgtgccactgaactccagcctgggtgacagagccagattgtgtttctattaaaaaaaaaaaaaaggacactccatgaaatctttggttcacatggtcacacactgatgcttagttgttcctgtatcccatatggccatagtagctttaataagtcttaaggcaatatttgccatctttagaaacctgcatgggaacaagcagatccaacagatcttgacctatggtatgtgtgactgaacagtcccttttgcttcttatttgtacattctatatctgttacatctgttttggattgtacattgtgtttggaatggattttcattgaacacaaactagataaaaatagatggctgaaagagtaattaaaacaaagtatttgacatatgaaagcatataaaatattgagaattattcattacaaaaattagccaggtatggtggcacatgcatgtgatctcagctactggggaggctgagataggagaatcacttgaacctgggaggcagaggttgcagtgagccgagatcactgcacttcagcctgggcaacaaagtgagactccatctcaaaaaaaaagaaattattcagtgctgttcataagctcatttagtaaatagtaattgagtgtctatgatccatgttgtgagattagcagcaattaaatcttaggctttgttgttatatcactatcatgatttctggtttccataaaaatcaaccaaagggatacccttttttttttagagacaggatttttttttttttttttttttttaaagagacaggattttgctctgttactcaggctggagtgcagtggtgagatcatagctcgctgtagccttgacctcttgtactcaagcaattttcccacttcagcctcctgagtagctgggactatagatgcatgccattgctcctggctaattttaaatttttagtagagaccaggccttgctatgttgcctaggctggtcttgaactcctgggctcaagcaatcctaacacctcagcttcccaaagtgttgggattacgggcctcagccatgatgcctggccccagagggatacattttggataaagctttttaatagttttgctttcctgatccaataaatttcttttagttctctgtcattgtctggcacctttcttcctcgttcttttttccaacaggaacaagctgatagtcaagactagctttagaatatatttcagacttcttgaattacctgtgacttacatcaaggaaataaaatatttggcaatatagccaaatgtgactataacactgatcatcacaggaataaaacctatattatagccttcccaccatatgaaaagagattacacatgtattctcataaagaactttaatccatggtattataaaatctgtgacataaacctaggtaatagaggtttatattatttctttaggtcctgttcttagatttgccattgtttaggaggattgtaattacccctttattgaaataataaatgagtttattagaaggatttatgatataaactctctatggaatatagttattcccatggccttatttttctcccaaaggcagggtaaactcccagcagttgcgtgggggaagagtcagaatcaaggaagactatctacttaaacctttaacagagttatgatgcctaaagtaaatcaggcgcttgcacaaaggaagtctgggttatgataatgttcatttgttaatttgatttaatttccaggaaaatacaatgaagatatctttgttatctaatactgagttaatgataatcttattttgtttttgttttttttactgagacagagtttttgctcttgttgcccaggctggagtccacctcctgggttcaagcgattctcctgcctcagcctcctgagtagctgggattacaggcacgcgtcaccatgcccagctaattgtttttgtatttttagtagagacagggtttcattatgttggctagactggtctcgaactcctgacctcagatgatccacctgccttggcctcccaaagtgctgggattacaggcatgagccaccgcgccgggccaacgataatcttataccaaatctgagtgccttcattttcacttccttctttcactacctggttctgcccatcaaggattgctggatctaatttgaaaaccaagaattttagagtagatcttacaaatctttgtcagctctaataaaccaaaaaaaaaaagtagtttttgattaagttttgaattgacttttcctccataaaaagtgtaatgaggctgggcacggtggctcatgcctgtaatcccagtactttgagaggccaaggcaggcggattatgaagttaagagaccaagaccatccttgccaacatggtgaaaccccgtccctactaaaaatacaaaaaaattaggtgggcatggtggcgtatgtctgtaatcccagctacttgggaggctaaggcaggagaatcccctgaacccgggaggcagaggttgcagtgagctgagatcgcaccactgcactccagcctggcgacagagcgagactccgtctcaaaaaaaaaactataatgggtacaaaatgactttgttttttgtttttttttttgggtttttttgagacagagttttgctcttgttgcccaggctggagtgcaatgattcagttttggctcacggcaacctctgcctcctaggttcaagcaattctcctggctgagcctcccaagtagctgggattacaggcacctgctaccatgcccggctaatttttgtatttttagtagagatgtgtttcaccatgttggccaggctggtctcgaacttctgacctcaggtgatccacccgcctcggcctcccgaagtgctgagattagaggcacgagccacagggccctccctgactttgggataatgtaaattatttttcaaaagctacaactattctatgctaacaattttggggtttttcttttttcttcttctttttttgttttattgacacagagacctgctctgtttcccaggctggagtgcagtggcacaatcaatcatggctgactgcaaccttgaagtgatcctcctgcctcaggcctcctgagtcgctgaaactatagggatgtgccaccacgaccaactaattttttttttttttagacaggctctctgtccccgaggctggagtgcaatggcacagtctcagctcacttcaagctccacccaccatgctcaagcgattctcctgccttagcctcccaagtagctgggattacaggcacacacccccactgcccggctatttttgtatttttagtagagatgggttttcaccatgttggctaggctggtctcgaattcctgacctcaaatgttccacccaccttggcctcccaaagtgctgggattacaggcgtgatccaccgaccccggcctgattttttattttttgtagagatggggtgtcactaagttgcccaggttggtctcaaactcttgggctcaagcaatcctcctgcctcatcctcccaaagtgctgggattatgagtgtaagtcactgtgtctggccaatttggggtttttcctaattagttaatgtaatcacatggttcaaaagagtatatatagtcaaaggacaacttgctatatgttttctctgctaaagtggattggttaatttttttactttttgttaccacaaagttcttgctgaaggattatattgtttatcaatccatttaataacatgttgaaataatatgctatataaatagattctttttttaataaaaattacaacgtagtctaaaggagaaacactgattctgcaaattaacaggcaaataaattgttaaaaattttgttgcattaatacttgaaatttgtaggtgtttgttaattaatgaagtttaattttctttcatttctagtcattagaccagatctactgcactgttaattaatgttcctgatttatataggtttgtaactatttttttcaaacagttgatacttggatggctattgatgttctctcttcttttcacagagcatgtcctttgcaacctgatcacacaaatgatgaaaaagaatagaactttctcattcatctttgaataacgtctccttgtttaccctggtattctagaatgtaaatttacataaatgtgtttgttccaattagctttgttgaacaggcatttaattaaaaaatttaggtttaaatttagatgttcaaaagtagttgtgaaatttgagaatttgtaagactaattatggtaacttagcttagtattcaatataatgcattgtttggtttcttttaccaaattaagtgtctagttcttgctaaaatcaagtcattgcattgtgttctaattacaagtatgttgtatttgagatttgcttagattgttgtactgctgccatttttattggtgtttgattattggaatggtgccatattgtcactccttctacttgctttaaaaagcagagttagatttttgcacattaaaaaattcagtattaattaaacattacttattctaccctcttttttggcaaggaggacaaatacgcaatgttggaaaaccttggatggatatcttctctttaaaaaaatgtaaagataatttggtcttgagggtttaaacggttgataatgcctctacaacaacaagaaaaaagataaaatactaggatagaatcatggtgggcacagtggcttctcaggaggctgaggagggaggtttgcttgagtccaggagttggagaccagcccaggcaacatagcgtaaaccctatctctaaaacaatttttagccgggtgcggtggctcacgcctgtaatcccagcactctgggaggccgaggcgggtggatcatgaggtcaggagatcgagaccatcctgcctaacaaggtgaaaccccgtctctactaaaaatacaaaaaattagccgggcgcggtggcgggcgcctgtagtcccagctactcgggaggctgaggcaggagaatggcgtgaacccgggaagtggagcttgcagtgagccgagattgcgccactgcagtcggcagtccggcttgggcgacagagcgagactccgtctcaaaaaaaaaaaaaaaaaaaaattttaaaaaaggctgagtgcagtggctcacacctgtaatcccagcactttgggaggccaaggcaggtggatcacctgagataggagttcaagaccagcctggccagcatggtgaaactgtcactactaaaaatgaaaaaatgagccaggcatggtggcacatgcctgtaatcccagctactcaggaggctgaggcaggagaatcgcttgaacctgggaggtggaggttgcagtgagcccagattgtgccactgcactccagcctgaacaacagagtgagacaatgtcttaaaaaaaaaaaaagaaagaaaagaaaaaaatatatatttatatatgaacaataaaaaattagcctggcatggtggcacgcacagtggaaccagatcccatctcttaaaagaaattttcctaggatttgcatttgattcggtgtcataaaatataattttaaagttggaagtcaatataacatgaaaggcaaatcatgccataaacccataggcatggcaaaactcctaagagctactatgacatttttcaacataaccagaggtataattgaagaagtgggtataatattcctcatcaccctttttgcagcagcctgttgtcaaaagtaatcatattttagtaggcatatttttctgaaatacgtttgtaataaatgcatacttatttttacaatacactatccatttgtgtgcttcctaaaattatgtcctattttattctttccaaatacaaatcagagcattgacctgattttaacaccttccaaactgtttgagtccgaatgattgtagattatattttttgctttgtcttttagaggtggatattattaaacagtatgttattgaattgggagctgaggttctaaaatcccaagtacttatttgataattaggtttatttttaaggagtagtttaaacaaaatatcttgaagtcaagttttaatgggtctgacacttcatttgctatttttcttttcttttcttttttagatggagtctcgctctgtcacccaggccagagtgcagtggcttgaccttggctcacaacaacttctgcctcccaggttcaagcgattctcctaactcagactccggagtagctgggactacaggtgctcgccaccacgcccagctaatttttgcatttttagtagaggcagggtttcaccatgttgaccaggttggtctccaactcccaactcctgacctcaggtgatccgcctgactgggcctcccaaagtgctgggaatttttttttttttttttttttttgagacagtctcactctgttgcccaggctggagtgcagtggcgcaatcttggctcactgcaagctccacctcccaggttcacaccattctcctgcctcagcctccctagtagctgggactacaggtgcctgccaccatgccctgctaattgtttttgtatttttagtagagatggggtttcaccctgttagccaggatgatcttgatctcctgacctcgtgatctgcccgcgtcggcctcccaaaatgctgggattacaggtgtgagtcactgcagccggccaagattcaaattttttagaaacaattacatgcctacattcaacttcagtctgggagcagtggctcacgcctataatcccagcactttgggaggccgaggcaggtgaatcacctgaggtcaggagttcgagaccagcctggccaacatggtgaaaccctgactctactaaaagtgcaaaaaaagactgggcatggtggctcacgcctgtaatcctagcactttgggaggccaaggcgggcagatcatctgaggtcaggagttcaagaccagtctggtcaacatgacgaaaccccgtctctactaaaaatacaaaaattagccaggtgtggtggcgggcacctataatcccagctacttgggaggctgaggcaggagaatcacttgaacccgggaggcagaggttgcagtgagcccagatcacgccactgcactccaggctgggtgacagagtgagactctatctcaaaaaataaataaataaaataaataaataataaaaatgcaaaaattagctgggcagggtggtacatgcctgtagtcccaattactcaggaggctgaggcaggagaatcacttgaacctgggaggtggaggttgtagtgagccgagatatgccactgcactccagcctgggccacagagtgggactccgtctcaaaaaaaaaaaaattttcaagtatatatttgatgatgtttcactttcattaggcaaatttatacataatgtttccttttcgaagcattttcaaaatgtagcatggccacttagcttttctaaacagaagggaagtatagaccccttcttttcattgaaactgaattaaaaagtaaaatctacccattaagaagatagtttaactaagattgattgattgattgattttgaggcaggatcttactctattgcccaggccagagtgcagtggtgtgatctcagctcactgcagcctcaacctcccttgctcaagtgatcctcctgcctcagcctcctgagtagctgggactaaggcatgcgccaccacgctcagctaattttaaattcttttttagatatgcggttttgctctgtcacaagctggtcttgaacccctgggctcaagcgatcctcctgcctcaacctctgaaactgctggggttaaaggtgtgagccaccatgcccagtcaaaaccaaggttttaattttgtacccttcttcacaaagttagtctgttttttttttttttgagatggagtttcgttctttttgcccaggctggagtgcaatggtgtgatcttggctcgccgcaacctctgcctcccaggttcaagtgatccttctgcctcagcctcctgagtagctgggattacaggcatgtgccaccatgccaggctaattttgtatttttagtagagatgaggttttttcatgttggtcaggctggtctcgaactcctgacctcaggtgatccacccacctcagcctcccaaagtgttgggattataggcatgagccactgctcacagcttttttttttcttttaatgcattattcaaattattaatgctagtgttactcctgaccagataatgattaaaactactctggaatttttgaatgctagagcattgtgagcatcatatgtattttgtgtttccatagttttacaaaggacgagcaaatactcaagagaaaattataaagagagctcaaagacttatttaaaagatgtcaaatgcttattatttttccccctcatctctcccatgagattctaaaaaaagtagaattttgcctgggtgcagtgactcacacctgtactcccagcacttttggaggctgaggcgggaggatcgcttgagctcaggagttggagaccagcctgggcaacatagacctcatctctacaaataatcaaaaaattaactgggcatggtggctcacatctgtggtcccggctactttgtaggctgaggtggtagaattgcttgagtccaggtggttgaggctgcagtgagtcatgatcacatcactgcactctaacctgctcaacaaagggagaccccgtctcaacagacaaaaacatggaatataaagcctaaactaaatgcacttttctcatgtgtacactgcttacaaattctactgtacttagaatcttcaagctaactcactttcagaaaaaaaatgttcaactgagccttggttcaaccatcattgttataatggtttcttttacctttgagaatagcatatgaaagtgggagagagattataggtatgagccactgtgcccggccgcaaccttcaattatttagataattgttatatctttagccttcctaaggctgttatgtcttcaagctttctaagcattaacatttgatggtttatgttatgtgtatcctaagtgactttctctgagtcccttgtgtaagggactatgtcttttatattgtatattgcttaggcacataaatgataagtttggctaaatttcttcttattgactccacacattcattaattgttagactgtagttttggtattttattttattttattttttattttttgagacagagtctggctctgtcacccaggctggagttcagtggtgtgatctcggctcactgcaacctccacctcccaggttctcctgcctcagcctcccaagtagctgggattacaggcacccaccaccacacctggctaattttttgtattttttttttttttttttttttttttttttagtagggacaggctggtctgaaactcctgacctcaagtgatccacccaccttggcctcccaaagtgttgggattacaggcatgagccactctgcctggcctagttctggtattttatgtttgaagatgccaatgtaactctaacaatatttaaatattaattcctgtagtagtatttaaatattaataattgagttacagcatattgggtttccccaatatacattagatatgttaagtttttaaatgattaccaagggcaataaaaaaaatgaagacagctcaagagagtgggagaaaagtttggaagtcccatattgatctgtaggatgaaggtactgtactgacttaatgagggctatttgagatctggcccagatctgagagcactgccttatagttcatattaagaatatggattcatgggctgggcgcggtggctcacgcttgtaatcccagcactttgggagtctgaggcgggcggatcacgaggtcaggagatcgagaccatcctggctaacaaggtgaaaccccatctctactaaaaatacaaaaaattagccgggcgtagtggtgggcacctgtagtcccagctactcgggaggctgaggcaggagaatggcgtgaacccaggaggcggagcttgcagtgagcctacatcgcgccactgcactccagcctgggcaacagagcgagactccgtctcaaaaaaaaaaaaaaagaatatggattcatggccgggtgtggtagttcacacctgtaatcccagcactttgggaggctgaggcctccaagagttcaagaccagcctgggcaacagaatgagacccccttctctacaaaaaatacaaaaattagccaggtgtggtggttcacagctataatcccggcactttgggaggctgaggcaagcggattgcttaagctcaggagttcaagaccagcctgggcaacatagtgagatcccatctctacagaaaatacaaaaattagctgggtgtggctgcacactgcatgcctgtagtgccagctatttgggaggctgaggtagaaggatcgcttgagcctacgaggtgaaggctgcagtgagccaagattgtgcctgcactccagcctgggtgacagagtgagaccctgtctaaaaagaaaaaaaaaaaagagagagactatggattccccacaaaaattacaaaagtgtagttaaactcacatacctaattttaggtggggtttgtactatctatctttagagatctcaaagcaatgagtatgttgaaaataatagaatagaggacatgtgatgaattaggagtcaagccagttattcatacacctatacaaaagtgcctggagtttttaaaaaagctgtaggaagagaggatgtaaacaaatgctgcttataaatcatttttcttcaggcagtgggtaaaatgagtgatgcataggaatttgcatttctacattggcttacgctatcacatttaatcataacttgattttcttaataaaacatttctttctatagaacacatttattatttaccataatcatgttttaattttttgaaacatcctagtctatcatagttttagatatattgttgttcattgagctcattttatttactatttcaaagttttttgatatttaaacctgtttggcaattgaaataccaagctctgttttgtcagggtaacatgtttaccacttgtcactttcagccaggtttttttttttttttcttggagacggagtcttgctctgtctcaggctggagtgcaatggcacgatcttggctcactgcaacctcagcctcctgggttcaagcgattctcctgcctcagcctcccgagtagctgggattacaggcatctgccaccatgcccggctaatttttttttttttttttttgatttttggtagagatggggtttctccatgttggccaggctggtctcaaacttctgacctcagatgacccaccctccttggcctcccaaagtgctggggttacatgtgtgagccactgcatcccgcccaggtttttaaaggaacaattagtggatgagctgaaattccatttgaattgtgcatgtgtatatactcccacatgtattcatgtcaatggcagaggtggagatgtattaaacatcctattgacccatttgagtttgaagtgatttcctaaaggttttgctgaagtgattgcctatggtgaatcaatttaaccctgtctcatgcatacaggaaaccaatagacgtggtgtttcgtttaagtgaccaaagctcatttcctctctgccccagttaaggtggataacagttcaattttggtgtctataaagaggttatcatgaccaataaaattagagcctgccgtggcaagtatattcactgccatggaatagaaaacaaatttaggagctactgttaagcattctgcttgtaagaagacctatttaagataggaaaaccaaatgaagatttttactcatttttctctgaatgcccaactgcatttctctgaatattttacctgccataacgatatgggttcttttccttttttttttttttcttttttctgaaacggagtctcgctctgttgcccaggctggagtgcaatggtgcaatctcggctcactgcaacgtctgccttctgggttcaaatgattctcatgcctcagcctcccgagtaggtgggatcacaggtgcccaccaccacgcccagctaatttttctatttttaatagagacagggtttcaccagtttggccaggctggtctcgaactccttacctcaggtgatcctcaggcctcggcttcccaaagtgctgagattacaggcgtgagccaccgcacccagcctccagatacgagttgtttttttcgagtattactttgttaacttttaccccaaccattcattttcccaatattttcaaaccccaaatcacccagacacaataaatgaggtctcttttcttatccatagtgtcggtatgaaagtttattttgaaggttttttttttttttttagacggagtctagctctgtctccatgctgcagggcagtggcgcggtctcggctcactgcaacctccgcctcccgggttcccgcgattctcctgcctcagtctcccgagtagctgggactacaggcacacgccaccacgcccagctaatttttgtttgtttgtttatttatttattattatttttgagacggagtctcgctctgtcatcaggctggagtgccattggagtgcaatggcacgatctcggctcactgcaatctccgcctcccgggttcaagcaattcccctgcttcagcctcccgtgtaactgggactacaggcacgtgccaccacccccagccaattttttgtattttagtagagacggggtttcaccatgttggccaggatggtctccatctcctgacctcgtgatctgcccgcctcggcctcccaaagtgcttacaggaggactacaggcgcgagccaccgcgcccggccaatttttgtatttttagtagagacggagtttcaccatgttggccaggatggtctccatctcctgacctcgtgatccgccagtctcggcttcccaaagtgttgggattacaggtgtgagccaccgcacccggcatattttgagttttgagtggaggattagacagtcttcttccttcccaaatttgattatgggctccctttagcctttttctttgttttctgtcttttttccaccaccaccccgcccccgaggcgcagtctcaagaggtcctgagaacatgtgccctgctctctgttttaaggattaaaataactgtcgagttacattgaatcttttttgcctattccatttggctaggttaattccagaccttacacaaacatgtgcagctcttacaaaatgtaggtgaagacaacatttttctaaccattcggcttcatgggctgtcacaggagaactaagtgcatgaaaaacctttcacaacattgaaagaaattttaaaaatctggttgaaacacaattaaaaatccacaagagggagatgcttgctaaaccgtcagaaaataattccctcgagggacctgagagaggagcctggagccttaggaacagccactgggtcagccacgggattaagggtgggagggagcaggagtatatagagacgggggcttggtggaggagtacagttgaagggaaaagcgggatgggtttcgtgcctctggcagcgaagcgtgtacttggtctaagatcttgagcagaaggtaagagcgtgttgccaaagcagagctcagtgctcccgatatatcttctggtagtcccagaagaaatgggggtgggttgctttgaaggcacttccgcttagcaaccccacgcggttgctaaggagggggcagccgtggggataacccggaagtgatggtgtcagtttaacgctgcctgcccaaagtttgtcctattaggcccgccagggtactctgcgactccgggacgagggcggggccgcgctagtggttccggttcggctccagccgcccctcggctcctcgccttccccctcccgtccgccttctcccctccctcccgctcctgggaaagagagaaaccaccgctgcgggtgggtagagaagcacttggcgcctcggggaggggaccgcgcccgcctcatttgcgccttgcagcactgctggaccaggtatctgcccggcttcgtcggggttctgtaggctgaagtctgagggggtgtgtgtgtgtctgagggggttggtggggggccctttcctgggcgtgggtgggggacgccgtgatcccgggtggggcgcaggctggcgtttgtgtctgtggagggttgcgggggcggaatggaggggctgagggacacagcgggtggagagtttcggttagcggggtagaggtaggcggaggaggcgccccttccgagaaactgactctagccggtgtggaccgggagtttgccacctggagggcttactctgaaagggggagcatcccccgggagccaaaaggagggcacagatctcgtcagggtgactggggctatcccgtgcttccattgccctctttccctacccaccccgctgggacagagctggacttcgaaggttgtgggggttctgagtcgactgggtaccgcggggagccgcccttggcggagcttagggcacaagagtgggtaatgagactttcctctacccaacttccgtacgcttcccccacttcttcctttactgtttcctcgcccccacgtcctacaggagcaatgtcccccaagtgggcaggcatcacaatgtaaaagagagtggaactgggtttgttgcccctaaatgacacttaagatgtttggaaagtgcctgaatgacatattcaaccaagtctcccagctcgatattaattccggtataaattaccttagaaaagtggaattctgaaaagcatttaacaataggctagtccaggtgtagtcttgtgtagtagatgtacgtgtttatttaaaaagaatggactggggaaaccatatagatgtatcacaggtctaggcaagacatgttgaggcaaggcttttgcagcctctttcttacctgccagtaaacctgtcctaatttaaatgaagtagaaagatcctcttcatttttgtttcaatcagtgactgaatactaggtgctgtgtagtgatgtctcagaacagatatgtgaattttcagagagagaatgaatgttctgctgttgagcctgtgtcttaatcttttaaggagataattgcggtcaagtggaagtattgactttcaggcagataaatcttgggttgaacctagactatgccagttgctagttactgaccttgggcaagtcatggaacctaccagagcttttgtttcttcataagtagtatgagttaaaattcttacctgtattataagtaacatcccattttaaacggaaccacctttgaattagaagataaattattaccattaatcatacacagtcaaggcagcccagttttgtgaaacgaggtttgagataggaaagcaaccggataatwttgaaaaaaaaatgcatacaataggactttcagtgtcttctcraaattgatcgtaggtagcatgaaattcagttatcagtagtttcttaaaattcaaaataataaagtagaatatggcccatttattgaaatgagcaaaatatattttatagatttttctcagctacaccatattggtgtttatagtatggattaacacgaaatacatgaaaaagtaatgtatgtaaatcttaacatcacatgtctctttaaagagaattaaaattggggtgtaaaatagaaggtacttgttttttgtttgtttgtttgtttgtttgagacagagtcttgctctatcacccaggctggagtgcagtggcacgatctcggctcagtgcaacctctacctccaggattcaagcgattctcctgcctcagcctcctgagtagctgggatcacaggcgcctgccactacacccagctaattttttgtatttttagtagagagagggttttaccatgttggtcaggttggtcttgaactcctgaccttgtaatccatccgccttggtctcccaaagtgctgggattacaggtgtgagccaccgtgcccggcctacttgtaattttaagataaaaatcagcagcatcagcagcacctctcatctcagttagatttatgctactagaaaaacttatataatattcagaaaacaaaatcgaatacatttctgcctttaaatcattccttattacgatatagaaataaatccaagaaacatgaagtctgttttttatttatttttagtgacaaggtctttctctgtcacttaggccagaatgaatgcactggggcaattatactcactgcagcctcaaactcctgggttcaagcaaacctcctgcgtcgccctcccaaagtgttgagattacaggtgtgagccacctcacccagcccatgaagtctttttctttctttttttttttttttttgaaatggagtctcactctgtcacccaggctggagtgtggtggcacgatctcggctcactgaaacctccacctcccaggttcaagcaattctcctgcctcagcctcctgagtagctgggattacaggcacatgccaccacatccagctaatttttttgtatttttagtagagacgaagtgtcatcgtgttagccaggatggtgtctatctcctgacctcgtgatccacccgcctcagcctcccaaagtgctgggattacaggcatgagccaccgtacccggccaaagtctttatactcatttgttttgtggatttaaaataatatagttatgtgtcacctattatatgtcagattttcagctaacgtagtttgctttttgaggtgacttatagttagttattttcaaatgtaatttatactcagaggacaaaaatcaaataacttcctgtaataatagatgtttgtgagaatacaaagtttgcaattcagtttgaccttttttgagaagttcataagttttgtgtaaatttgtgagaaattttcttttctttttttttaaagacagattcttgctctgtcacctaggctggagtgcagcagcataatctctgctcattgcaatctccgcctgctaagttcaagcagttctcgcacctcagcttcctgagtagctggaactacaggcgtgtgccaccatgtccagctaatttttgtgtttttagtagagaaggggttttgccatgttggccaggcaggtctcgaactcctgacctcaagtgatccgccagctttggcctcccaaagtgctgggattacaggcatgagccaacacacccagccctgagaaattttcaaatatatttcttccccatgtctctttgttttataaagagttgaaattaggccaggcatggtggctcatgcctgtaatcctagcaccttgggaggccgaggtgggcggatcacctgaggtcaggagtttgagaccagcctgagcaacatggagaaaccccatctctactaaaaatacaacattagtcaggcatgatggagcatgcctgtaatcccagctactcgggaggctgaggcaagagaatcgcttgaacccgggaggtggaggttgcggtgagccaagattgtgccattcactccagcctgggcaagagcaaaactccatctcaaaaaaaaaaaaaaaaaaagaagaattcaaattatgttttgtgatagttacagagttttggtaaggttatttagctttctaaatggctcttctgagagtgtaaggtctgtatatatctaagctttctgctgtgttttcttttatcttttcactttttttttgagatggagtcttgctctgtcacccatgctggagtgcagcggcactatcttggctcactgcaacctccgcctcccgggttcaagcaattctactgcctcagcctcctgagtaagctggaactataggcatgcgccaccatgctggctaatttttgtatttttagtagaaacggtgttggccatgttggccaggcggctctctaactcgtgacctcaggtgatccacccaccttggcctcccaaggtgctgggattacaggtgtgaactgccctgcccggcctgctgtgttttctcgtatcatttttttatcatcctttaaatcttaaagttgagatcatatgctttggtaaagctctcagaagctcccactttttcccctgtcttcttctcaaactataatactgtattaatatttttaaaaatcttttttgtttttgagacggagtttctgttacccaggctggagtgcccaggctcagcttactgcagcctctgcccctcaggttcaagcgcccctcctgcctcagtctcccgattagctgggattacaggtgtgcgccagcatacctggctaatttttgtatttttagtggacatggggttttgccatgttggccacgctggtcttgaactcctggcctcaagtgattggcccgcctcagcctctcaaagtgctgggactacaggcgtgagccaccgtgcctggcccgataatctattaattttgatataagagatagtatactagctgctagagtaaaaaattctatcttaattgtgtgcaatgaatagagacggttagagatttctcaatcaccacttcctctcaaagtctgtggccgttccaaggatctttgcagttgtcagttatggaatttgcttgtcaggaaatctaaaaatgactaaacctttgtttaatatctatctcttggatgacctcagaaagttttaggaaagattgggaaggtttatatatgtaccatatactagaattagataatgaacaaaatacagctgaatttattggcgctatacaatcaggagtgagttactgtgaaaatgttattaaaaagtccaggcggtgctttctttttactcaaaccaaatgagtattcttccagagctcatttttattttaaagcatatttcttttatggagctgtgatttagtctctaataaggataaataatcattatataaaaaaaggctggtgtcatagattttagtactacatattgatagaaactgcttcagtggttttagataagtgtattttccggaaataacttttgaatttgtggaatgatagtttttctctttttaacagttaacttgtctctactcatttctgcccaatatagaagctctgagaagctgggaggaaaaaaaaaaagaaaaagaatggatttacttcagaattaccattttaagttgtagagattacttatttggagagcaaaattggattttgacattattgggattgtgttcaagatggactcaggaaaaaaaatttagatgccatctgtttcagattccttctctcccaaccccttttatgttttatggctttgagttcatcagattattttgtaaaaataaaaatcctcagtagatttaggttatataatatcagctctatcagtgaacatgtaaccaaagatcttgcatttttatattgagttatacaggatgatgacagatactgtttaaagttaattgttatttcaaactatatgaatggtaacttcatgcatcttttaattctcactgttcacttgataaaccaattttttttttttggagacagagtcttgctctgttgctcaggctggagtgcagtggcgtgatcttggctcactgcaagctccatctcccgggttcacgccattctcctgcctcagcctccggagtagctgggactacaggtgcctgccaccacacccggctaattttttttctttttgtatttttagtagagacggggtttcaccgtgttagccaggatggtctcgatctcctgaccttgtgatccgcccgccttggcctcccaaagtgctgggattacaggtgtgagccaccgcgaccagccgataaaaccatttttataagtagtatttaacatagtccacttgttgatggaagcttaaaaaattgataaaaagatattttagattaaatctttattcacttgatgtcttaaaaccagaaaagaagcttcttctgaggatttttaacttaaaacaagcttacttaaatttactctttcagtagtggattttatcttaccctctgtgccagttgcttagttttcatctaaatgtgtgcacatagttggcacttttcatttgggatttttttaatttttaattttttttttttttttaatttttggagacgagggtctcagtgtgttgctcaggctggtcttgaactcctgagctcaagtgatccttccacctcaacctcctgagtagctgggattacaggtgctaaccaccatgctaggttcattttggatcttaataaattctgacggcaggcttttgggttactaaactgtaaaagaccaaacttgctgaggttataaccttaacttagcggaccagaaagactcagtcatctcagagaaattgaaatagcactagtgtggtatcccagaaatggcctaaagagagagccatctggatagaagccatgctttgtctgcagcaggaatgttctgatgagatagaaagacagatggactgtccccacactaatgtagtctgtccctcacccagaagctccaagtgggcagtgtagttatagtgggggttggggtgctagggatgggaattattctttaataatttctcacccatcacattggaggtgtgggtatactgggtagagggatattctcttagtttttgccttgtccagagatgtcgggtgaagaggtagccattgcccttgccacgaaaagggagaagcctgggtgccgagtttgatgtctccatcaaaatgctacataaatttgccagggaacaatagcattggatccccatggatttctgctgcttatacattctaactccttagcctataaaaaggggtatttacgacttcctgaatgaaagttatacattttcttctgtcttgatacttttttttttttttttttgaggtggagtttcgctctcgttgcccaggctggagtacagtggcgtgatctcggctcactgcaacctccacattccgggttcaggcaattctcttgcctcagactcctgagtagctggaattacaggtgcccgctacctaccatgtccagctaattttttgtatttttagtagagatggggtttcaccacgttggccaggctggtctcgaactcctgacctcaggtgatctgccctcctcagcctcccaaagtgctgggattacaggtgtgagccaccgcgccttgccaatatgttttaaaatacactttaatttctctgttgaccataatgaatgatgtgaaatttttttcttttcttcctttttttggtgtttgagtatccatgataatcaccagatctcattttagctttaggataaattgctaaccacagctgtgatcaagccgcttcccagctggaattcttttccatttcctagaggtcactctctgatgtgggtgctggtgagcagagagaaatgactaatgccaggaaaaggcaagaggattaaaatctcttaattttgtttgcactttgctaaaatttctgtagtctacagtggcaatatttactctttgagattgtgtatgccctattgtgtttttttcattaatttttttttgaatacttttagatttctggaataagagagcagatagtacatagagttcagtgtgcttctctcctccatcccccagtttcccctattattaacatcttgcattagtgtggtacatgtgttacaattaatgaaataatattgatacattattgttaactatagcatctggtttacactaaggttcactctgcattgtacattctgtgggttttgacaaatgcataatgacacgtatccaccattacagtttcctacacatagtttcaccatcctaaaaatcctgtgtgcttcacatccctcctctcctgcctgaattactggcagacactgaccattttactgtctctatagtattgccttttccaaaatgtcatatagttagaatcatataacatagagctttttaagattgttttttttttcacttagcaatatgcgttgaatgttcttcgtgtcttttttttttttttgacacagagttgtgctctgtcgccaggctggagtgcagtggcgggatatcagctcactgaaacctccgcctcctgggttcaagcgattcccctgcctcagcctcccgaatagctgggattacaggcacatgccaccactcctggctaattttttgtattttagtagagaccgggtttcaccatgttggccaagatggtctcgatctcctgacctcgtgatctgctcgcctcagcctcccaaagtgctgggattacaggtaggagccactgtgcctggcctcttcatgtttttttgtggcttcatagctcatttctttttattgcaggacaatttttcttttctcttttcttttctgtacattttccttccttccttccttccttccttctttccttgtttctttcttttttttttttttttaagacggagtgttgctatgttgaccaggctggccttgaattcctgggctcaagcgatcctcctgcttcagcctcccgagtagcttggactacaggtgcaagccagcatacccagttggtattgctgaataattttctgttgtatagatgtgccacaatttgttgatcccttcaccatttgaaggacatctttgttgcttctagtttttgataatgatgaataaagctggtataaacatacatgtgtaggtttttctatcattaaaagttttcagctcttttgagtaaatacccaggagtgtgattgctggatcttatgataagactatttaatttggtaagaaattgtcaaactgtttcccaaagtggctataccattttgtattcctacgagtaatgaataacaagagttcccgttgtttcacgtcctcactagcatttcgtattgtctctttttttgtattttactcgttatctaatagatatgtagtagtatcttgttttaatttgcagttctctatgatgttgggcatctttttgtatgtttgacatttctatacctttttggatgaggtatctgttcaggtcttttgcccattttaaaataaggttgtttgcttcttgttgagttttaagtggtcattgtgtattttggatacaaatccttaatcagatatattttttgcaaatattttttccagtctatggcttgtctttttattctcttaatagtgcctttcatagtgcagaagtttttaataaggtccaagttaacctcttctctttcattgataatgcttttagtgttatatctgaaaactcatttccagccaggtgtggtggctcacacctgtaatctcagcactttggggggccaaggcaggcagatcacctgaggtcaggggttcgagaccagcatggccaatgtggtgaaacctcatttctactaaaaatacaaaaattagccgggtgtggtggtgtgcgtctgtaatcccagctactcaggaggctgaggcaggagaatcacttgaacctgggaggcggaatttgcagtgagctgagatcgcaccattgtactcctgtctgggcaacaagagcaaacctatgtctcaaaataaataaataaataaataaataaataaataaataaataaataaataaaaactcgtttccaaacccaaggtcacttacattttctcctatttatcttcaagaattttttatcgttttgtagtttacatttagttataaggtttattttaagttagtttttttttttggaaaggtgtaaggaatatgtgtatatgcatgcacatgggtgaccaattgttttttttttaatttattttttaattaaaaaaaataaacagagatgaggtctcactatattgcccagtctggtcttgaattcctgatctgcccacctttgcctccaaaagtgctgggattgtaagtgtgagccactgcatccagtcgtgaccaattggtttatgcaaattttttctgccgggtgcagtggctcacactcagcactttggtaggctgaggtgggcagatcacgaggtcagaagatcaagaccatcctggccaacaaggtgaaaccccgtttctactaaaaatacaaaaattagctgggtgtggtggcgcatgcctgtagtcctagctacttgggaggctgagacaggagaatcgcttaaccagggagtaggaggttgcagtgagccgagattgtgccactgcactccagcctagcgacagagtgagactccatctcaaaaaaaaataagtttttttttctattctacaagcgttaataaggatgttcttaaagaaactaaaacaaatgaaataatctgtgggagttatttttaaatgagagtttcctaacgttctcgaatgtaattagaagcattgttcagagtgtggttttccctttcaagaagattgattttaggttattaggtcttaattgacaactgcttaattatttcatacatgtattagagtcttaggaagtatgagctaaatgtggcacagtcatgtgatgtttcaggttgtaaaggggcttgataggaaatttaaatgcagaatttttcaactgtcactaaggacaagagcctttgtcacttgggttttattgttgcgaagggtttcaactatacagattttgatcaccctctctagtgtttgctgctgcttattacacttgttgaagactatctagaagcttgagctggcaaaaactgartaggaagcgcttccatgggtactgctgtactttcctgaatattttcaattctgtctcaggctgagaatcttgattctaaaagtaatagaatgctgtcctgagacattttattctcatgtagcctgagtactaattgttagctagaatcctctttcacttggctttataactgtcctgtcctgtacttctagaacagcttctattttctaaaacattttaaccttaattggtataatgacatctaaatattctggtcatctagggtatgatgcaagaattgtttaataactctgtttggtgagttttgtttgttttttcacctagttaaataagtcaactaggaactgtctgtgtgaaagcacttagattctccagagatacattatctccaaatcaatcaatatgaaggctcactttgtctttaatgggatccatctggttaatrctgtgtttcttgagtttcatagattatgaaatcataaagctaaaagaaaatatggagatggtctagttagaccctttcattttacagctgagactacttaagtgcagagaggctaagtgacttgctcaagattgtacagctaattaatgagtcacactggaattcagtgtagtcttatttctgatataactgtgctaattttttcattgcagttagtgaagaaattatggatttataagaagtaaattttccaggaggtttaagtggacttaaattaagtatttcttataattgaaatgtgtatatttctttcaggtaccaggtgtcactggatttytatgagcaaatttgttatrtttcacgttccagatagaaatcagccaatttaaaaatagtggtgaagttattatagcctatatttaatgagcacacatttggctgcattaaaatgaatcttaatgtattttttgcacagcggagataatctgttaatatttaatgccataaagcaacaatggaattctgctttcatgtggtgtatttataaaactagagtagagtgttatgtaaaaactaaaagtacagattaatttaatatgcatctggtgaattcagggcttgaaggatgcacatctgttgagaaaacaaatcatagaactattcagagtttcagcatctttaaatatgtgcgctttgattctgttttaactgttttgaaacagtctttaatggatttagaaaaggccatttgctctaaggaagcaactgtgaagccacttacaatgctattattcattttattattttttaaagcatttttatacattactatttttctttccaatttatttattggggaaggaaggggctaaatgactcaccataacaaaatgagtttgttgcagaaccatgtttaaaaagaaaggaatgtaatttgctgaattcaatagattagaaatattttaaggctttgtcaaaataatacgccaaaaaatattttaaggctctgaattctaatttgaactcacaatcagtgaagaaataatcagtttctactgtgtattcatcaccatactagagctgtggtaatatagaaattgaagatatagtctatatcttcagcttctatattaccgcagctctagtatggtgatatagattatatcttcaatttcgagttgaaagaaacaagacttaaaatgaaaggtagagaataacacagatatgtaatgaagcaaaaacttgatctaatctgtcaacattacagtaatttagaggggagaaaatccagtgagtattcacaattctgacaggaaggagattaaagttaaagtagtggatctcaactctgactgctccttagaatcacttgggaaaacttaatcaaaaatcagatgaatcagaatcttgggtgaggtgcatctgcagtttttaaaagctttcccagatgtttgtaatgtgcaggcagtgttaagaatcacaggcttaaaggctgggtttgatttggaaaagcaagaaagtgtactaggccagcacagggtgggagaattggccacagtctgtgaaaagattaatccagtcaaagcagtgtgtgctaggtggggaggaaggagaaataagcctacagaggcagaatggggtctattttagaagaggtgtgtgtgtgtgtgtgtgtgtgtgtgttggagttttgctcttgttgccctggctggagtgcaatggcacgatctcagctcgctgcaacctctgcctcctgggttcaagcgattctcctgccttggcctcccgaatagctgggattacaggcatgcgccaccacaccccgctaattttgtatttttaatagaggtagggtttctccatgttggtcaggctggtcaagatagaatagtacttttcaaaatgtggtttcttgaccagcagcagcagcagcagcgtctcctggaaatttattataaatgcagattttaaggccctggtcccatacctactgaattggaaactctagactggggtccagcaatctgtattttaacaagcatgccagatgattctgatgtacactcaaagtttgggaactgctgttaagagaggataatgaaagttaggcagaggaaattagatttgatgtgctcataagcagggatccatagaagatttttaatttttattttttaatcatttacttattttccatgtatccaagkcacgaaccagccatgggcacagaccaagagccaagatgggataaacaagggttgctttatccctggatgacatgagatggacatcaccacattaaaggttcttaagctagagagtaacaggaagtatctgtatgtattcaaggtaaatctgatggtgatctgcacaatactttggattactaaaagatatgaatgaagtgggctggttgaggaaatgcagacataatctagtggatgtaatctagcagcagtaaaggcttgttctagggaagtattagtgagaaaacataatactaataatagtgatggcaatttattgagagtttacataacaagtggcatgttaaatgcattttattctcacagcaagccactgaagtgtggctattccagttttacagatcagcaaatgaggcagagaaaggaaggttacttctgaagttcacactgctggtatgtggtggagccaggatgtcaagctcaagaatctctgcctctaaagcctcttgaagaaacagctaataatatctggagagccacgagaaaaaggaaaatacttgagtctgaaaagttttaatcctacttgacagagtgcaaggggacgtcactgtcggaagggaaatagtgcatacagtgggtaacaagggaagtcatttagccagttgggaacaaaccatcttgtaaaagtgaccatgaggaataaccgatggaaatttttgtatagtgctttttcagtataaagttcgaagtaactttcaatagttgagtttataggttttgtttgttcttgctcatgctgactaaattagaagagtcacctcatcccgcttttaaaaagggtcttttagattttagagtagatagtctgtgagtaagtcatgcccaagaagcttactgtaataccacttttccctctctaagcatcttagtcttaagacagtttaagctgagtgtggtggcttatggaggatcacttgaggccaggagttcaagatcagcttgggcaacatagcaagactctgtctctataaaaaataaaaaaaaattagctgggtgtcatggcacgagctggtagtctcagctactcaagagattgaggcaagaggattgcttgagcccaggagtttgaggctgcagtgagatctgatcatgccactacactccagcctgagtgacagggcaagatgtctttgaaaccaaccaaccaaccaacagaagaaataaatgacagtttaataaatatttcaggccgggcactgtggctcacgcctgtattcccagcactttgggaggccaaggcgggtggatcatgaggtcaggagattgagaccatcctggccaatgtagtgaaaccccggctctactaaaaagataaaaattagctggacgtggtggtgtttttgagacagtgcctcactctattgcccaggttggagtgccgtggtgtgatcatggctcactgcagtaccaactacccaggctttaagtgatcctcccacctcagcctcctaagtagctgagaccacaggcacacaccaccatgcctggctaatttttaaaaaactatctgtagagacaggattttgccatattgcccagtctggtcttgagctcctgggctcaagtgatcctctggcctcggccccccaaagtgctgggattacaggcatgagccaacatacatgaccttaaagtggtttcacagaagttctacctagyaacttcattagccctttgctgcaaggtaattaggctgcccagaataaaactggactttactgagggagtggtgattctgggaaagccacctgcagtctctaccacatcatataacaataaaaggtttagtttaccaggaagatactagaattctgttacttataccagataatacaggttcaacatacataaacctacataacaactacaaggagaaatttataaattcaccattatattagaatagatgtttttgacattaaaacaatacttcctgccagcagagatgtgctaaagaaaaaaaaatcattaaaacaacacaacaagacagagctattgggtgaatatagaacattgtactcaagttttaaagaattagtttcatacagttactactatttgcagatatagttactttgtggaatccaaaatttctgtaatgcgagaggtaacaaccttcaaagtagccctgaaaatctcaacaaattcaaagaatatgtattctatagaccaaaccttcgatgacagtgcaaactaaattaggactcagttttttaaaaaaatgacctttaaaaatgtttggaaatttaaaagaacacatctaaataactcttgaggttacaaaagaaataatgatagaggtttaccaatgcataacactgaatgttaattaaaaaaacaacatcaaaattgatggatgcaacttagtggttcttgggcatagcatatagtcaagtttcataaatactctgtgagagtttgaaaagaccattctctagttgagggcagtggtattaatagaggaaaagagcctcagaaattgagaactgtcagtcactcctcttgatttaatattcgtatttaaggccttgtgcaatttgtcctctgacagttgtcagtgggcactactgctcctcctgtttcttttgctttaatcttaattacataattaaagttctcttattagacactagtggttctaaaatgttagcatgtattggaattttctggagggtttgttaaaacacagattgctggctgggctcatgtctgtaatcccagcactttgggaggctgaggcgggtggatcacctgaggtcaggagtttgagaccagccgggccaacatggcgaatccctgtctctactaaaaatacagaaattagccgggcgtggtggtgggtgcctgtaatcccagctacttgggaggctgaggcaggagaatcgcttgaacctgggaggcagaggttgcagtgagcggagattgtgccactgcactcccccttgggcgagagagtgagactctacctcaaaacaacaacaacaataacaacaaaaaacaaaaaaacacagattgctggtcctcaccccctgaatttctgattcagctcatctggggtagggcctccaaatttccattttcagcagatttgcagatgatgttcatgctggtgacctagggacaatgctttgagaatcactgtactagagattacattcacttgactgtatcccttgtaactgctaattcttttcctgtagccccttttctctcctccttaactttttcccttcagaatcctgcactttaactctccccttttcttggaagtactttttttttgagatggagtttcgctcttgttgcccaggctgtagtgcagtggcgtgatcttggctcactgctatctccacctcctgggtccaagccattcttctgcctcagcctctcaagtagctgtgattacaggcatgcagcaccatccttggctaattttgtatttttagtagagacggggtttcaccatgttggtcaggctggtctcgaactcccaacttcaggtgatccaccagcttccacctcccaaagtgctgggattacaggtgtaagctatcgcgcccggccagaagtgtttttttttttttttttttttttttttttgagaccgagtttcactcttgttgcccaggctggagtgcagtggcacgatctcagctcaccacaacctgcacctcctaggttcaagcgattctcctgcctcagcttcctgcgtagctgggattatagacatgtaccaccacacccagctaattttgtatttttagtagagatgggagtttctctgtgttggtcaggctagtctcgaactcctgacctcaggtgatctgcctgtcttggcctcccaatgtgctgggattacaggtgtgagccaccgcgccgggctcaagtgtttttaaccatcaagttgttagatgtcccatgcctatgcttacttagaaaatggttcttgcacatctatagaagtcctaatcttgctatcatactaaatatcacttcacatccattaagatagctattaaaatacacacacagaaagtaaaaaagtagtgaggatgtggagaaattggaactctatttattgctggtgggaatataaaatgccgcagccattgtggaaaacagcttggcagtttctcgaaaggttacacataggactaccatatagacccagcagtcctctcttaggcatatatctaaaagaatcaaaaacagggtttgaaacagatgtttgtacagtacctttataacagcattcataatagccaaccaagcgcctgttgacagatgagtgcataaacaatatgtagtatatacatacaaaggaaggaaattctgacacatgctatgacgtgggtaaactttgaaaacatgcttagtataataagtcagacacaggacaaatattgcatgatttcacttatgagctacctaggatagacaaattcaaagacaaagtagaatagaggttatcaggggctgatggggcagagaaaagcagagctattgtttaatgggtacagaattaatgttgaggataatgagaatattttgggtatagatactggagactgttacacaatattgtgagtgtgttttcatgccactgaattgtacatttacaaaaggctaaattataaatattatatatattttatcacagtaaaaaacaaagccaggtgggttcacatctgtaatcccagagctttgggaagctgaggtgggaggattacttgaggctaagagtttgagaccggcctaggcaacataatgagacccattctacaaaaaataaaataggcatggtggtacctgtagtcctagctgttcgggaggctgaagtggtagaatagcttgaacccaggagttcgaggctgcagtgagctatcatggtacgactgcatttcagcctgggtggcagagcaagattctgtctcttaaaacagacaaaaatgttagtatattactggaaaaacttattagaagtcttttttggtgatgaagtttcactctcatttttttgtcatatgtttctatgagttctgcttgcttttgtttttttgttttgttttgtttgagacggagtctcgctctgttgcccaggctggcatacagtggcaagatctcagctcacagcaacctccacctcccaggttcaagcgattctcctgcctcagcctcctgagtagctgggattacaggtgcctgccactgcgcctggataatttttgtatttttagtagagatggggtttcaccatgttggccaggctggtcttgaactcctgacctcaggtgatttacccgtcttggcctcctgaagtgctgggattacaggtgtgagccactgcgcccggccgagttctgcttttttcaaaataacaagcatgtgtttctgaatcagaaaaaagtaaataatacgttaaaaagacatatgtgaatatttataaaatatgtttatgtgaaggattttctgtaatgtaaatctcactagtgaaaatttttatattacttgagtagatgatttttccatagaatcgtgactaaaactgagttttccatgaactgttactaacctgtaaactttctctctaatgaaagttatattttccttggttatagatgctttctagtttgttatatctatgtcagttattttgaatctcttacattttcagatcaaaaattaattattattgttatttttttgtttgagatggagtctttctaagttgcccaggctggtcatgaactcctgggctcaaagtgatcctcccacctcagtctcttgagtagctgggattataggcacatagcacaggacctgccaaaattattatttaaatttatcaattaagcatgttcagtgacataggtaagtattgagtgcaggtagcatttatgctgacttcagtagaattcctgggctttaaaacaaataagaaaggaagaaaggaagtatgtagagtatggcttatacactttgaggacattgtggttttgctttgtaattttcttgtgaatagaataaggagtgaaatgagagatcgaatctagttaatcaagataatttgtcaagtaaatttcagttacttgaaaacagtcaattcaattttacatttgtttactctgttttgggcatggtgctttgaacggtttaggtacgtaagtcagagagcagtccctagtcgcatagagttccatagaatagtttggtaggcagataggtaaaaaatagccacataaatcgatagatggatatatgaattaagatgaatattattcattcatgctccataaatttattgagcaactgttatactatgtgttaggcctagtgtaggtactgggggtatagtgacaaacaggaaatatttgtgcttgcattgaaaaagattactgggatgttgcaggtaaattttattttctccttattcttaggtttttgaaatgaaatgactaggacaatacaggaacaacagcaagaatttgttgactttcatccttagagaactcaagtgaggatgtagcttgtatgacagtctagtattttcttgatcaacagaaaaggttgaaattctaattgtttccatcaacattagaatgattctttactactaagcttgtgatagggtttttaaaaaataataattgttaaagttggttattaaagcttaaaattcaaatcatcaatcacaaagtaaatattcatgaaagaaatatactgattctttaggaggtagatagtgatgaggcagttaatggaaaaatcaagtcagtaatttcttgggacaatcatcaaggctgcctttttgtgtttctataggcagtcatggtgactgactttgttaccaaagtgcagttattaaagcccttattttttttaaggaaaagtataacaattgaaagaaaaatgaggatcaggacctttgtggtactttatttttatgccagtaagaagtgtctgtggctcctcaatactggcttcatcttgattgttttattatttattttccttgagtagggaaggaaagccatcttctcagataaggttatgtttttattgttttagcctagctttgcttaaaaaaatttttagtgaggtagacaaaactctttatcaggtattgaaatatgtttttcctaaaagcatgtattaggctacccttctcacacaggatgtgttctgaaatgacaggtagatttgcagcagattctcattttctttgtagattatgtgaactgagcagtacttgcaaaataagtcaataatctgaatctttgtagtaactcttctggagttattagggaaaccaaaaatggaaataatattgtggtctctaagcttactctaaattaggtagttatagaagtacactttttggtgaaggtaagtttaactgctgtcatctgttagataaaacaggggtcctgaagctctgggccacagaccagtagtggtccatggccctttaggaaccgtgctgcatagcaggaagtgagtggcaggtgagtggcaggtgagtgcgtgaagcttcatctgtatttaaagccactccccatcacttgcattactgcccgagcgccacctcctgtcagatcaatggcagcattagattctcataggagcgtgaaccctgttgtgaactgcacgtgagagggatgtaggttatgcactccttatgagaatctaatgcctgatgattggccagagtctcccatcacttgcagaaaggaccatccagttgcaggaaaacaagctcagggctcccactgattctacattatggtgagttgaataattatttcattgcatagtacaatgtaataataatggaaattaagtgcataataaatgtagtgtgcttgaatcatccctaaaccattcccccctgccctccacccccagtctgtggaaaaattgtcttctgtaaaactggtccttgtgccaaaaaggttgaggactgctgagataaaagattttaggctgggcacggtggctcactcctgtaatcccagcactttggcaggctgaggcaggcatatcacttaaggtcaggagttcaagaccagcctggccaacatggtgaaacaccatctctactgaaatacaaaaaaattagctgggcgtggtggtcagtgcatgcctgtaatgaatgattcatgtggtaatgagaagactgtatatcttgcagttcttgggtagaatgttcagtaaatatctgttaggtccatttgttctcaagtgcagtttaaatccagtgtttctttgttgactttgtgtctctaagatctatctagtgctcgaagatctatctatctagggctatcagtggagtgttgaagtcccccattattattgtgttgctgtctctgtcttttcttaggtctagtagtaattgttctatgaatctagatgctccagaattaggtacatatatgtttaagattgtaaaatcttgttaaattgatccttttatcattgtataatgactttgtctttttaaactgttgtttctttaaagtctgttttatctgatgtaagaacagctattacttcttgcttttggtttccgtttgcatgtaggaatccttaggtgttaggtgagcctcttgaagacagcaaatacttggtttccaattttttatccattttgccaatttgtaccttttaagtggcgcatttaagaccatttacattcagcattaatactgagatgtgaggtactgctttagtcatcatgttgattgttacctagacactttgttgtcctcattatgttattttatagaccttgtgagttttgtgctttcaggagcttctattctggtacatattgaccttttttttttttttttttttttttttgagatggtgtctcactgtgttgcccaggctggtcttgaactcctggattcaagtaatcctcccacctcagcctcscaaagtgctgggattacaggcatgagccactgtgcccagccattgtttcaagatttagacctccttttagcattccttttttttttttttttttttttttttgagatggagtctcactcttgttgctcagtctggagtgcaatggcgcaatctgggctgactgcaaccttggcctcctgggttcaagtgattcacctgtctcagcctcccgagtagctggcattacaggtgcccgccaccatacctggctaagttttgtatttttagtagagacaggatttcaccatgttggctaggctggtcttgaactcctaacctcaggtgatccatctaccttggcctcccaaagtgctgggattacaggcatgggccactgctcccagctagtcagggaaattttcttcaattattccctcaaatcagttttccaaactttctggtttttcttttccctcaggaacaccagtgattcttaggtttgaacattttacataatctcatttatcttgtgggctaaaaattcttttaaaaaattttatgtaactttaaacataaaagtaagatattttgcttatatgagcaagaaaaattttaaattatttttcaactactttttttttgtttttgtttttttttaaattgttttgtgatttgggtttttttattttattttattttttttttaattatactttaagttttagggtacatgtgcacattttgcaggttagttacatatgtatacatgtgtcatgctggtgcgctgcacccactaactcgtcatctagcattaggtatatctcccaatgctatccctcccccctccccccaccccaccacagtccccagagtgtgatattccccttcctgtgtccatgtgatctcattgttcaattcccacctatgagtgagaatatgcggtgtttggttttttgttcttgtgatagtttactgagaatgatggtttccagtttcatccatgtccctacaaaggacatgaactcatcattttttatggctgcatagtattccatgatgtatatgtgccacattttcttaatccagtctatcattgttggacatttgggttggttccaagtctttgccattgtgaataatgccgcaataaacatacgtgtgcatgtgtctttatagcagcatgatttatagtcatttgggtatatacccagtaatgggatggctgggtcaaatggtatttctagttctagatccctgaggaatcgccacactgacttccacaatggttgaactagtttacagtcccaccaacagtgtaaaagtgttcctatttctccacatcctctccagcacctgttgtttcctgacttttyaatgatattcattctaactggtgtgagatggtatctcattgtggttttgatttgcatttctctgatggccagtgatgatgagcattttttcatgtgttttttggctgcataaatgtcttcttttgagaagtgtctgttcatgtccttcgcccactttttgatggggttgtttttttcttgtaaatttgtttgagttcattgtagattctggatattagccctttgtcggatgagtaggttgcgaaaattttctcccatgttgtaggttgcctgttcactctgatggtagtttcttttgctgtgcagaagctctttagtttaattagatcccatttgtcaattttggcttttgttgccattgcttttggtgttttggacatgaagtccttgcccatgcctatgtcctgaatggtaatgcctaggttttcttctagggtttttatggttttaggtctaacatttaaatctttaatccatcttgaattgatttttgtataaggtgtaaggaagggatccagtttcagctttctacatatggctagccagttttcccagcaccatttattaaatagggaatcctttccccattgcttgtttttctcaggtttgtcaaagatcagatagttgtaggtatgcggcgttatttctgagggctctgttctgttccattgatctatatctctgttttggtactagtaccatgctgttttggttactgtagccttgtagtatagtttgaagtcaggtagtgtgatgcctccagctttgttcttttggcttaggattgacttggcaatgcgggctcttttttggttccatatgaactttaaagtagttttttccaattctgtgaagaaagtcattggtagtttgatggggatggcattgaatctgtaaattaccttgggcagtatggccattttcactatattgattcttcctacccatgagcatggaatgttcttccatttgtttgtatcctcttttatttccttgagcagtggtttgtagttctccttgaagaggtccttcacatcccttgtaagttggattcctaggtattttattctctttgaagcaattgtgaatgggagttcactcatgatttggctctctgtttgtctgttgttggtgtataagaatgcttgtgatttttgtacattgattttgtatcctgagactttgctgaagttgcttatcagcttaaggagattttgggctgagacgatggggttttctagataaacaatcatgtcgtctgcaaacagggacaatttgacttcctcttttcctaattgaataccttttatttccttctcctgcctgattgccctggccagaacttccaacactatgttgaataggagcagtgagagagggcatccctgtcttgtgccagttttcaaagggaatgcttccagtttttgcccattcagtatgatattggctgtgggtttgtcatagatagctcttattattttgaaatacgtcccatcaatacctaatttattgagagtttttagcatgaagggttgttgaattttgtcaaaggccttttctgcatctattgagataatcatgtggtttttgtctttggctctgtttatatgctggattgcatttattgctttgcgtatattgaaccagccttgcatcccagggatgaagcccacttgatcatggtggataagctttttgatgtgctgctggattcggtttgccagtattttattgaggatttttgcatcaatgttcatcaaggatattggtctaaaattctcttttttggttgtgtctctgcccggctttggtatcagaatgatgctggcctcataaaatgagttagggaggattccctctttttctattgattggaatagtttcagaaggaatggtaccagttcctccttgtacctctggtagaattcggctgtgaatccatctggtcctggactctttttggttggtaaactattgattattgccacaatttcagctcctgttactggtctattcagagattcaacttcttcctggtctagtcttgggagagtgtatgtgtcgaggaatgtatccatttcttctagattttctagtttatttgtgtagaggtgtttgtagtattctctgatggtagtttgtatttctgtgggatcggtggtgatatcccctttatcattttttattgtgtctatttgattcttctctctttttttctttattagtcttgctagcggtctatcaattttgttgatcctttcaaaaaaccagctcctggattcattgattttttgaagggttttttgtgtctctatttccttcagttctgctctgattttagttatttcttgccttctgctagcttttgaatgtgtttgctcttgcttttctagttcttttaattgtgatgttaggatgtcaattttggatctttcctgctttctcttgtgggcatttagtgctataaatttccctctacacactgctttgaatgcatcccagagattctggtatgttgtgtctttgttctcgttggtttcaaagaacatctttatttctgccttcatttcgttatgtacccagtagtcattcaggagcaggttgttcagtttccatgtagttgagtggctttgagtgagattcttaatcctgagttctagtttgattgcactgtggtctgagagatagtttgttgtaatttctgttcttttacatttgctgaggagagttttacttccaactatgtggtcaattttggaataggtgtggtgtggtgctgaaaaaaatgtatattctgttgatttgggatggagagttctgtagatgtctgttaggtccgcttggtgcagagctgagttcaattcctgggtatccttgttgactttctgtctcgttgatctgtctaatgttgacagtagggtgttaaagtctcccattattaatgtgtgggagtctaagtctctttgtaggtcactcaggacttgctttatgaatctgggtgctcctgtattgggtgcatatatatttaggatagttagctcctcttgttgaattcatccctttaccattatgtaatggccttctttgtctcttttgatctttgttggtttaaagtctgttttatcagagactaggattgcaacccctgcctttttttgttttccatttgcttggtagatcttcctccatccttttattttgagcctatgtgtgtctctgcacgtgagatgggtttcctgaatacagcacactgatgggtcttgactctttatccaacttgccagtctgtgtcttttaattggagaatttagtccatttacatttaaagttaatattgttatgtgtgaatttgatcctgtcattatgatgttagctggtgattttgctcgttagttgatgcagtttcttcctagtctcgatggtctttacattttggcatgattttgcagcggctggtaccggttgttcctttccatgtttagcgcttccttcaggagctcttttagggcaggcctggtggtgacaaaatctctcagcatttgcttgtctgtaaagtattttatttctccttcacttatgaagcttagtttggctggatatgaaattctgggttgaaaattcttttctttaagaatgttgaatattggccccactctcttctggcttgtagggtttctgccgagagatccgctgttagtctgatgggctttcctttgagggtaacccgacctttctctctggctgcccttaacattttttccttcatttcaactttggtgaatctgacaattatgtgtcttggagttgctcttctcaaggagtatctttgtggcgttctctgtatttcctgaatctgaacgttggcctgccttgctagattggggaagttctcctggataatatcctgcagagtgttttccaacttggttccattctccacatcactttcaggtacaccaatcagacgtagatttggtcttttcacatagtcccatatttcttggaggctttgctcatttctttttattcttttttctctaaacttcccttctcgcttcatttcattcatttcatcttccattgctgataccctttcttccagttgatcgcatcggctcctgaggcttctgcattcttcacgtagttctcgagccttggttttcagctccatcagctcctttaagcacttctctgtattggttattctagttatacattcttctaaatttttttcaaagttttcaacttctttgcctttggtttgaatgtcctcccgtagctcagagtaatttgatcgtctgaagccttcttctctcacctcgtcaaaatcattctccatacagctttgttccgttgctggtgaggaactgcgttcctttggaggaggagaggcgctctgcgttttagagtttccagtttttctgttctgttttttccccatctttgtggttttatctacttttggtctttgatgatggtgatgtacagatgggttttcggtgtggatgtcctttctgtttgttagttttccttctaacagacaggaccctcagctgcaggtctgttggaataccctgcagtgtgaggtgtcagtgtgcccctgctggggagtgcctcccagttaggctgctcgggggtcaggggtcagggacccacttgaggaggcagtctgcccgttctcagatctccagctgcgtgctgggagaaccactgctctcttcaaagctgtcagacagggacatttaagtctgcagaggttactgctgtctttttgtttgtctgtgccgtgcccccagaggtggagcctaaagaggcaggcaggcctccttgaggtgtggtgggctccacccagttcgagcttcccggctgctttgtttacctaagcaagcctgggcaatggcgggcgcccctcccccagccycgctgcctccttgcagtttgatctcagactgctgtgctagcaatcagcgagattccgtgggcgtaggaccctccgagccaggtgtgggatatagtctcgtggtgcgccgttttttaagccggtctgaaaagcgcaatattcgggtgggagtgacccgattttccaggtgcgtccgtcacccctttctttgactcggaaagggaactccctgaccccttgcgcttcccaggtgaggcaatgcctcgccctgcttcggctcgcgcayggtgcgcgcacccactggcctgcgcccactgtctggcactccctagtgagatgaacccggtacctcagatggaaatgcagaaatcacccgtcttctgcgtcgctcatgctggaagctgtagaccggagctgttcctattcggccatcttggctcctcccccctactttttttttttttgatacagagtttcgctctgtcacccaggctggagtgcaatggcgtgatctcagctccctgcaacctccacatcccaggttcaagcgattctcctgcttcggcctcctgagtggctgggattaaaggtgcctgccaccatgcccggctaattgttgtatttttagtagagacggagtttcaccatgttggcaaggctgatctcgaactcctgacctcggatgatctgcgcacctcggcctctcaaagtgctgggattacaggtgtgaagcaccatgcctggcctaaactacttttttaaatgttaaaaatattttcttgggccaggcatggtggctcacacttataattccagcactttgggaggctgaggtaggtggatcacttgaggccaagagttcgagactggcctgagcaacatggcaaaaccctgtctctactaaaaatacaaaaatcagctgggcatcatggcacacacctgtagtcccagccacttaggaagctgaggcacaagaatcacttgaaacctgggaagtcgaggttgcaatgagccaagattgtgccacttcgctctagcctgggtgacagagcaggactctgtttccaaaactatttctttttgtagttcatggcttaaaacactacaaaactgaaagctgagatgcaaaggtttttattcacatttaatgaggtaaagtgtgatgtaatataagatatgacatgatgtgggtagcaccactggaatcagggcagatatgagtttgaactaactctctgtctctctgtccgtctctgtctctgccatttcttagctgtgtagtattaggccaattacttaccctctctaatcttttcttttatgtaaagtgataataatcatacctctttcataggatagttattaagatagtccaagtgaagtgtcttgcatagtgcctggtatgcagtaggcacttaaaagatgcttgtcttattactgtaaaaatttagagatgtgatttaaggcctaaagttataatagttaaaggtagttataattatggagcttttaaaacctttatttaaagtagttgtgaatctacttctctgctatttgagtaaatttgttatagaaatgattatataattttttgtgattctggggctatgagtttctcttggtatgaagtaagtaagccattataatatgagaataaggcagtactaacagctatcaggatatgtgcattgtcttttaggcaagctcaccacctgtataccttctccaattaatagaatttggagttgtttttactgaaaataatgaaagatgagtctgaaagctgagcatatacatttgtagaattcaaacggatgcctgctatgctgcttatgagtgagataatgtaactgtagctatatcccagtgaaggtaaaatatcactaacaaccacttgaaattgtgttgctccattctccttaaaatatacttctattactgtgtagctgtaggggatgattataggaaaaagtgtccactacccagatgtcacaaatactgaaaacaacaaaagaattctttattaaatcctgtattaatcaagttctcatgattcagatgctttttacatgttcaatagttaccctgctaacacatattacagagtatcagactgtatggtaataatttcactgtacaatacaagctaatttagtaggattctattgatgtattcaaaacttgaatattttacatgaaaatgtacttattccctaaaagaataaattttcttataataccatgtgcatttgttgcacagtcagcagtgactcttaagaaccattaaagaaatttcatggagttcctttataattaggcaacaagaatatgtggtcctagggtgtattagtcagggttctctagaaggacagaactaatagaatatatgtatatatgaaggggagttcattaagccgaattgactcacacagtcacaaggtgaagactcaccataggccatctgcaaactgaggagcagggaagccagtctgagtcccaaaacctcaaaagtagggaagcagacagtgcagcctccagtctgtggccgaaggcctgagagcctctggcaaaccactggtgtaagtccaagagaccaaaagctgaagaacttggagtcagatgttcttcgagggtaggaagcatccagcatgggagatagatgaaaactggaagactcagcaaggctgctcttttgtcttcttctgcctgctttattctagccattttggcagctgattagatggtaccacccagattaagggtgggtctgcctctcccaggccactgactcaaatcttaatcttctttggcaataccctcacagaaacacccaggaacattactttgcatccttcagtccaatcaagttgacactcagtattaaccatcgcacaggacaatcatatgcttcggtatttataggtttgggtaatcagtgtagtgtttataaatacatagtagtgtaagtcaggggcttttgagtcaggatgtcaagtatctacctgacaaaagtgtcaaagcctctactgctttctagttttgttacgcatcttacttggtttcctcatctgtgaagtgagaattatagtaacagtattactatccataaggtagtggaaggatttaatgaattaatatatttaaatcatttaaagtgtacctggtgcataaaggcccaataaggtttagatggtgtagttgttactgttctacaatgtgacatgtcttaaagcaaactatttttatagaacagtaaaatcagctgggaaaagagaggctttgttttaagaacactagtattccttttgcatttccacatagctatagagtgagaagataaggggataatggcgttttgaaggaaggaggggagtaaatataactttaaagattttaattggatgggtgaaattgtttatatgttttaagtatagtcagtaattggccaggcacagtggttcatacctgtaatcccagcactttgggaggccgaggcgggtggatcacctgaggtcaggagtttgagaccagcctgaccaacatggagaaaccccatgtctactaaaaatacaaaattagctgggcgtggtggcacatgcctgtaatcgcagctactagggaggctgaggcaggagaatcgcttgtacccaggaggcagaggttgcagtgagccgagattgcgccattgcactccagtctgggcaacaaaagtgaaactctgtctcaaagaaaaaaaaaaaagtatagtcagtaattaaataattttttgagactggacaaaagttaaataaaagtaagctagtaattatattcaatgtcatagcagattttaaaccacagcttttcaggttgccagtaaataccacacaaaagcaagaggaggctggttgtgctagcttacacttgtaatcctagcactttgcgaggccaaggcaggaggatcacttgaggccaggagttcaagaccagcctgggcaacatactaagactccattttttaaaaagaaaaaaggaaaaattagcccagcatagtggcgtgagcctgtagtcctaggtactcagggggctgagacatgaggattgcttgagcccaggaggttgaagctacagtgagatgattgtgccactgcactccagcctgggcaacagagcgaggaaaaaaaaaaacaacccaaaaacaaaacgaggaatgtaaaagtgcagtgcattttacaatgttatgattaaagtgaactctatcttaaattttataataactgactttattttacttacttatttagtttttgagataggatctcctctgtcacccaggctggaatgtagtgctcactccaggctctgcctcctggacttaagtgatcatcccacttcagcctcctgagtagctgggactacagatgcgcactaccatgtctggctaatttttgtattgtttaattaatttatttttttgctagagacagggtttcaccatgttgcccaggctggtcttgaattactgggctcaagggatcaacccatcttggcctcccaaagtgctgggattacaggcatgagccaccatgcctggcctgtactaaatgagattaaaaacttgctttgggccagacatggcggctcatgctggtaataccagcactttgggaagtcaaggcgggaggattgcttgagcccaggagttcgagaccagcctgggcaatgtagtaagaccttgggcaatgtagtaagaccgtgtctgtatttaaaaaaaaaagagagagaaaagaaaacttgttttgcttgcatgtaccaattgagagtatagtatgtgcttcaaaggaaaaaggtttaactgttgaacagctttaggagaaataaccaaattgctttgtgggtatttcatgcacaaaactaggaaagagaaatgaatatgggaggattcaagttacaataagactttatgctccatgagaggaagatattacatattacagaatattgatttcagaaggcaaaagatatttactacttatgctccatgagaggaagatattacatattacagaatattgatttcagaaggcaaaagatatttactacttagagtaatttagttaagaaaaaagaaaaaatacagtaaaatgttagataagatccaattagagcctaccaggcactcttgtgaggtttgttactgccttctgtggtttatcagtagcttagcgggaactatagaaaaataattcaggctttatgtcccaaatcataactgtaactccctccattcttctccactttcagtaggtggaggaaagtcttactcagggaaaatttaacaatatggtcatttcataattagaaaactttattaatactggtgttaggtgtttgaccagacacttttaaatttaccgtgttcatggcttccttaattgagtacaatatcagaagcagctgtcttcatattagccaatagcccatagatctttagtaattttgtgcatgatatattatggccatttctctttatattataaaactgtcatagaaatgctttaattaggctgggtgcgatggctsgtgcctgtaatcccagccctttgggaggttgaagcaggaggatcgcttgaatccaagagtttgaaaccagcctgggcaaacatagcacaacctagtctcttcccccaccaaaaaatagaaaaattagctgggcatggtggtatgtgtctgtggtcccatctgcggggaaagctgaggtgggaggattgcttgagcccaggaggttgaagctccagtgagccatgactgcactgctgcactccagcctgggcaacagagcaagtccctatctccaaaaaaaaaaaaaaggaaaaaaagaaaaaaaatgcttttttttatttcagtgggtaataagctgttattttgtgtgatgctcatttccttaaataatacattaaattgttattttttgcatttgaaattgaaaaatgggaatttttctcttgaataagaaacagaaatgaattaaacttattaccaatagtaatcatactattctgaatttctctatagagagcattataaatatctcatacttttgcttttatattacgaatttgtattgtagggtgaaaaagatactttttaatcttaaacaggatattttcctttgtgttttgtgaattcccacccttgtttttggcaatgtagatcacttacgctaaagatttaaaaagccatatttcactttaagaacttgagaccagaggttacaaactggtggtgtggacagtatttaaaaattttaaaaaattaattgcgaacatataaaaactgggagattttattaaaatttcagtgttaagcaacttctgaaaactcagagctggccacattgcatgggacccgtattcttttttttcttttttcttttttttttttttttttgtgatggagccttgttctgtcacccaggctggagtacattgacacgatctcagctcactgcaacctccacttcctgggctcaagcgattctcccgcctcagcctcccaagtagctgggattacaggcacttgccaccacgcctagctaatttttgtatttttggtagagacagaatttccccatgttggccaggctggtcttgaactcctgacctcaagtgatccgcctgtctcagcctcccaamgtgctgggattacaggcgtgagccactgtgcccggccccatatttttatatggcaaaattcaacaggagcagaaatagctgtacctgttaggtgggacacccactattcactttgccactctacaccttcccagtaaagaatcaatatccggtacttctgagcgttgtaacctcttcattaatgcatttgtttttttgacgtgtgcctgtttcggtggaattatctagagaataagaaaaagggcctggtgcagtggctcactcctgtaatcccagcacttagggaggccaagcatgtggatcgcttgagcccaacctgagaaacatggtgagactctgtctctacaaaaactaaacaaaaattagccagatgtcatggtgctcacttgttgtaccagctactcaggaggctgaggtgggaggattgcttgagcccagaaggttgaggcatcactgcactctaacctgggtagcagagtgagaccctgtctcaaaaaaaaaaaaaaaaaaaaaaagccctgatctacttaggcagtcatttattttatacaagcagtatttttcttttatgctttattcaaaataaaggtgttacattttgtgtctgtaacacgaatacagggggtgaagcatgatagcggattgcctgagctcaggagtttaagaccagcctgggcaacacggtgaaacctcgtctctactaaaacacacacacacaaaattagccgggcatggcggcatgcgcctgtaatcccaactactcaggaggctaaggcaggaggattgcttgaacctgggaggcagaggttgcagtgagcgagatcgtgccactgcactccagcctgggcaacagagggagactccatctcaaaacaaaacaaaacaaattcaacgaactgaaataagcttataataatttaaaattcaggcaagtattgcttccataaagcaatcacctcaagaaagcacttaytctaaaagtgctactcaaagcatttttggaaaaaaaaaaaaggtatatttcctttgaatagtctcaggatgcctgatatcctttgagagtagatgcgttttaataatagtaatacatgtaatttgacaagaaaatcaaatgggacaaattttattaagtagtgagaaaccagctcaaagtctaacatgtgagactctggatgataccaggttttatccagcatcacagtaaatttgaacctcattagaaacatttgtccaaagtaaatagttctctggaaaagatgatattataaatgtaagtttaggtcaggcgcagtagctcacgcttgttaattccagcactttgggaggctgagrcaggcggatcactttgagcccaggagttggagaccagcctgggcaacatggcaaaacattgtctctaaaaaaaagtacaaaatttagccaggtgtagtggtgtgtgcctgtagttccagctactcaggagactgagcaagagatcacttgagcctgggaagtagaggttgcagtgagccaagatcatgttggccaggcacggtggctcatgcctgtaatcccagcactttgggaggctgagatgggtagatcacctgaggtcaggagttcaagaccagcccggccaacatggtgaaacctcgtctctactaaaaatacaaaaattagccaggctcgttagcatgtgcctgtaatcccagctacttgggaggctgaggcaggagaattgcttgaacttgggaggcggaggttgcagtgagctgggattgcaccactgcattccagcctgggtgacagggcgaaactttgtctcaaaaaaaaaaaaaaagatcatgccaccacactccagcctgggcaacagagtgagagcctgtctttaaaaaaagaaagaaagaaagaaagaaatacaagtttatactcagcagcccttcaaacttacctccctcccaaaataatatgatataatgaattaaccaaaaaacaataataccaaagcatcactagcaaagaaaacttcagagtgatgaaaaccaggtaactgccctaatctcatgccacaaatttctagaaatgtctttcagaaacagtattatttagaccagatggaaagaaaatcatttgcagctattttttttgagcatacactgttgttagaaccacataaagtttagaaacccctactgatacgtcacgggaagaagaaagttagttgggtatataattcagttgtgtcttgaggccacaactacaaagccattaaaaatatatatatatatgattaattttttgtaaaaatttttatataaatatatatttccctcctctttgataaaagctcttaatatcacagttggcttacttctacctggaagaactccccacctaagttggataaggtttagaagtgaagtcattaggtgagaaaattggcagcagtctcgaaatccttttcccagctatgtagcagttgcttaagcccctagcttcctttccatctttgtcaggtgaaatgagtgaatcaattagagaaactggtattatttaccaggtaaactcaagaaaaatcagttgcactaattgtaggctaaagatagaccacgtttgaaatctcccagttgaaaaattattttaaaaacagacatgaggctgaatgtggtggctcacgcctataatcccagcacttcgggagactaaagtgtaaggattgtttgaagccaggagtttgagaccagcctggggaacatagtgagaccacgtttctgcaaaagaatttaaaaattaggtgggtgatggtatgcccctgtagtcccagccatcctgggccatcctggccaacacaacgaaaccctgttgaaaacaaataagtaaaaacagatgaaatgtaattcaccacattaaaaaaaaaaaaaaaagagaaaccttatcactttgatggatacaaaaaaagtatttgataatattcactaatagttcataataggaaaaccttcacaataggatttaaaaggaacttaatctgataaagactctacaaaaattctatagaaaactttaggccgggcacagtggctcacgcctgtaatcccagcactttgggaggccaaggctggcggatcacctgaggtcaggagtttgagaccagcctggccaacatggtgaaacactgtctctactaaaaatagaaaaattagccgggcgtagtggcgcacacctgtaatcccggctacataggaggctgaagcaggaaaattgcttgaacctgggaggcggaggttgcagtgagcctagattatgccactgcactccagcgtgggcgacagagcgagactccatctcaaaaaaaaagttccatgtctctaaaggctgtgacatgataatagcagcaataatacgaattatgatgtagcaggacaagccgcagacaaaacccctcagacaccaaagggctttattcggccgggagcatcagcaaacttaggtctcaaaaaaccaagctctccaagtgagcaattcctgtcccttttaagggcttacaactgtaagggggtccacgtaagagggtcatgatcgattgagcaagcagggggtacgtgactgggggctgtatgcacgggtattcagaatggaacagaacaggacagagattttcatgatgcttttccatacaatgtctggaatctatagataacacaagcagttaagtcagggcttgatttttaactaccaggcccagggctcagagctgggctgtctgcctgtgaatttcatttctgccttttagtttttacttcttttttctttggaggcagaaattgggcataagacaacatgaggggtggtctcctccctttatgatagacaagctgtattaactttttttcttttcttttttttttttttttttgagacagagtcttgctctctcgtccaggctggagaacagtggcatgatttcagcttactgcaccctccacctcctgagttccattgattctcctgccttagcctcccaagtagctgggactacaggcgtgtgccaccatgcccggctaatttttgtagttttaatagagacaggttttgccctgttttccaagcttgtcctgaactcctggcctcaagtgatgagctcgccttggcctcccaaagtgttgggattacaggcgtgagccaccgagcccaacctgcattaactttttctgtttgtttgtttgtttgtttgtttgtttgttttaaaaagcaaaactgagtgccagtggcttatgtttttaatcccagtgctttgagaggctggggttggaggattgctaaaggccaggagttcaaggctgccatgagctctgaccatgctactgcactccggcgtagctgacagagcgagaccctatctgttaaaacaaacaagcaacaacaacagcaaaacccaaatgtgtgctttaaatagataaattgtatagtaggtgaattatatttaataaagctgtttttaaaaaacacagatttgacccatggagaaattttgccccagaaagggggcataaatatagtattcaagtgaggaagagcattcagtgtgttagaagaaattttaagtctctcgagggaggaataattagctcctttgaaaaaaatttgtggacatgttaaaatcactgcacagattttttaaaaaaaattgtttcaggaggacagttgtgaggccagtgcacttttggctcagtgggaatgaatgggtaagtgagtgggcaagcaggatcatttggttggtgtggcagaagggaggagggctcaggctttttggactcctttgactgtgtttgacagtgtgacctagtcagtgaacataattctgtgaggctcagcgtcctttttgaaaaggaataattgcctttactaaggcaagtaattccagtttgactccactgaataggtcacacagcacctagagtcaatcgtttagaaaatgtaaatgctttttgtaaagctaaatccctttaagcataaatgtcagtaccattcttaaatgtcttcttattggactatcagtgacctataaaatcctgaacaatggactcctgctacctctttactttgctcattgtaatccccggcgttgctggtcttctttcaccaaaagcctttcttaataggctgctgctttttcctttctggaaactgtgttccctagctcttgacaaggttggctccatctcttccttgaggacactgtttaaatgtggcttctaatttatgttttcacaacagtgtacaaggattccctcttcttctcatccgcaccaatacttgttatctttggtcttttttgtaattgccatctgacagagtaagaatgtaagttagtattcctattatggaaaactgtatggaggtttgtcaaaaaactaaaaatagaattactacatgatccagcaataccacttctgggtatttatccaaaagatttgaaatcagtttgttgaagagatgtctgctttcttatgttcattgcagcattattcacaatagccaagttatggaatcaacctaagtgttcaacacatgaatgaataaagaaaatgtacacacacacgcacacacatatacatattcagccttaaagaaggaattatgtcatttgtggcaacttggatggaactggagaatattttattatgctaagtaaaataagccaggtacagaaaaacaaacaccgcgtgttcttacttatgtgtggaatctaaaacaactgaactcatagaagcagagaatagaatggtggttacagagcctggagggttgagaaagtggtgagaccatggttaaagggaacaaaatctcagctgagggatatgttttttttttttttttttaaattctgtggtacagtgtggtgaagatagtttttgtacattttaaaattgctgagagaataaatttcaaatattcttaccacaaaaatgttaagtatttaaggtaatggatatgttaactagcttgatttaattattatatattatattcataaattataacattactttgtaccccttacatttatataattataaattgtcaacatacaatttttaaacttttaaaaaataaatgtgtcttctaataaaaggcttcccacccctctatctaaaactcttccatgctgtgcatggtgacacatgcctgtaatcccggtttctcaggaggctggggtgggagaatctgttgaacccatgtgttcaaggctgcattgcactgtgatctcacctgtgaacaggcactacactccagcctgggctacatagcaagaacacatctctaaatatgaataaaataaaactttcctctttgatttcaccgtaatccttagtttagcagatctttgatatgtagcatcgtcccgatttgtgtttttttaattcatgtgtttgtgaggccctctctacactagaagttctgtgagcagaggagctgtatatgtcaagttcactgttatatcctcagtggaataacccagttttaggcacataggaggcactcactgaatagttatttattaatttttttttttttgccatatacctacaaccttctaacttttatttttaagattaaaaaaaaagttcttggtttttggggtttttttttttttctcccagcaggagattttttttcttacttttaaaaaattattattatactttaagttctggggtacctgtgcagaacatgcagttttgttacataggtatacacgtgccatggtagtttcctgcacccatcaacccatcacctacattaggtatttctcctaatgctatccctaccctagccccacaccccccaacaggccccagtgtgtgatgttcccctccctgtgtccatgtgttctcattgttcaactcccacttatgaatgagaacatgcggtgtttgattttctgttcttgtgttagtttgctgagaatgatggtttccagcttcatccatgtccctgcaaaggacatgaacccatctttttttatggctgcatagtattccatggtgtatatatgccacattttctttatgcagtctatcattgatggacattggggttggttccaagtctttgctattgtgaatagtgccacaataaacatacgtgtgcatgtgtcttcatagtagaatgatttataaccctttgggtatatacccagtaatgggattgctgggtcaaatggtatttctagttctagatccttgaggaattgccacactgtcttccacaatggttgaactaatgtacactcccaccaacagtgtaaaagcattcctatttctccacatcctctccagcatctgtttcctgactttttaatgatcaccattctaactggcgtgagatggtatctcattgtggttttgatttgcatttctctaatgacagtgatgatgagcattttttcatgtttgttggctgcataaatgtcttcttttgagaagtgtctgtttatatcctttgcccactttttgatggggttgtttgtttttttcttgtaaatttgtttaagttctttgtagattctggatattagccctttgtcagatggatagattgcaaaaattttctcccattctgtaggttgcctgttcactctgatgatagtttcttttgctgtgcagcagctgtttagtttaattagatcccatttgtcaattttggcttttgttgccattgcttttggcgttttagacatgaagtctttgcccatgcctatgtcctgaatggtattgcctgggtttttatctaggatttttatggctttaggtcttacatttaagtctttaatccatcttgagttaatttttgtataaggtgtaagaaaggggtcctgtttcagttttctgcatatggctagccagttttcccaacaccatttattaaatagggaatcctttccccatttctggttattgtcaggtttgtcaaagatcagatggttgtagatgtgtggtgttatttctgaggccactgttctgttccattggtctatatatctgttttggtcccagtaccatgctgttttggtaactgttgccttgtagtatagtttgaagtcaggtagtgtgatgcctccagctttgttctttttgcttaggattgtcttggctatgtgggctctttttttggttccatatgaagtttaaagtagttttttccaattctgtgaaggaagtcaatggtagcttgatggggatagcattgaatccataaattactttgggcagtatggctattttcgtgatattgattcttcctctccatgagcatggaatgtttttccatttgtgtcctctcttatttccttgagcagtggtttgtagttctccttgaagaggtccttcacatcccttataagttgtattcctaggtattttattctcttagtagcagttgtaaatgggagtttactcatgatttggctctcttgctattggtatattggaatgcttgtgatctttgcacattgactttgtatcctgagactttgctgaagttgcttatcagcttaaggagattttgaggcatggtctcactctgtcgcccaggctggagtgcagtggtgtgatgtcagctcactgcaagcaccacctcccaggttcaagcaattcccgtgcctcagccacccaagtagctgggattacatgcatgcaccactgcacctgactaattttataggtgtgagctaccaaaccccgtggctttttttttttttttttttcactttttttaaaaaagactggctctcactatgttgtccaggctggaatgtagtagctattcacaggcgtggtcatcatgcatgtcagcttcgaattcgtgggctcaagtgagcctctcaccacagcctcctaagtatctgggaatatatgtgtgtgacaccacacctggcttcacaaaatatttgttgatttaactaggaacactttgaataaatgtagtggtttgtatttttcctttttgacacctggaaattatccaaactccttctgtaattgctattattctttaagattcatttatgtagaagtagtattttaaaatgcgtgtgtaggctgggcatggtggctcatgcctgtaatcccagcactttgggaggctgaggcaggcggatcacctgaggacaggagttcgcgactaacctggccaacacagtgaaaccctgtctgtactaaaaataccaaaattagctgggcatggtggtgcatgcctgtaatcccagctacttgggaggctgaggcaggagaatcccgggaggtggaagttgcagtgagctgagatcatgccactacactccagcctgggtgacagagcgagactgtcttaaaaaaaataataaataaaataaaatgcatatgtatatatgtttttcttttttcctttttttttttttttgagatggagtctagctctcttgccaggctggagtgcagtggtgcgatctctgctcactgcaacttccgcctccagggctcaagcgattctcctgcctcggcttcccgagtagctgggattacaggcatgcgccaccacacccagctaatttttgtatttttagtagagatggggtttcaccatattggccaggatggtctcgatctcctgaccttgtgatctgcctgcctcggcctcccaaagtgctgggattacaggcgtgagccgctgtgcccggcctcttttccttttttttgagacagagtgtttctctgtcacccaggtagtagcacaatcatagctcactgcaacctcgaactcctaggctcaagggatcctttcacctcagcctcccaagtagctgggactataggtacacaccaccatgcccagctaattttttttttttttatagagacacagtctcaccacatcacccaggttggtcttgaactcctgggctcaagcagtccttctgtcttggccttccaaagtgctgggattataggtatgagccaccgtgcccaggctaaacttttttttttttaaacagttatttaaatcttcttttyttgcagtacaagatacagtacatttcacatatgtcccttttcctgttggaaaaggtgaatcaagtggagggaagtaaattgatattgaggctgagaataaaattgcaggtttctagccttgattttctacctctcacctactttgtgcctatgtaaataggctgtttcttcatggccaggaaaaaatgaaatagctgactattgacaattccagaaagcacccagataagaatacttagagttggatttaaaacaaaacctacccaccccttttttggggagagacagggtctctctgtctcccaggctggagggtagtgttgtgatcacagctcactacagtcttgacctcctgggctcaagtgatcttcctgcttcagccatccaagtagctgagactacaggcatgtgccaccctgctaatttaaaaaaaaaaaagtctgtttgtagagatggggtctcagtatgttgaccaagctggtattgaattcttcggctcaagcgatcatcttgtcttgacctcccaaagttctaggattataggcatgagccaccacaccaggccaaaatcagtttattggccataagttttcatcttttgatgttctctcatgccatttaaaatgggtgaaaatttgggttatagttttctaatgactgttgctttttcacaatgatcacaatgataacgcatggcagataattagggcaggatatacctcaaatgtctgtttcccaaaacaagcaattacaatgcccttcttatgtactccttttagcacctcaccatagcactaatcacagtgcattgtagttgcttgtttacttgtgtagtagctctagtagctcggtgaaggttgtcacattcaccattttatttgcagggtacttgtgacaggtactatagtcatggtacttttgattatctttttctttctactcagaatggtggcaagaattatgatatctggagtttggatttttttagccttgtgagatctgttcattggttgaaaaccaagattgagaactcatttrtktgtgtgtgtgtgtgtgtgtgtgtgtgtgtgtgtgttttattcactaagtatttgagaacttaccatgctaggccctgcaaataaaatggtgaatgtgacaacagtttttaccttcacagagctaatacgtgagtagacaagcaattacagtgcactgtgattactgctatggtgagttactaaaaggactacataagaggggcactgtaattgcttgttttgggaaatagacatttaaggtgaaaactaaatatgagcataagttaacataatgaagagcagagataaaggaggacccaggtccagggccctttggaagccttgaagtaagtttgatattcattaacataaaatataagggaacagttaaacagaaattaagcggaagaggtaagcaagtgccagatctggaatgacctcaagccatgtaaggatttttttttttttgagacagagtctcactctgtcgcccaggctggagtgcagtggcgtgatcttggctcactgcaagctccgcctcccgggttcacgccattttcctgcctcagcttcccgagtagctgggactacagatgcctgtcaccacgaccggctaatttttttgtatttttagtagagatggggtttcaccgtgttagccaggatggtctcgatctcctgacctcgtgatccacccgcctcggcctcccaaagtgctgggattatagatgtgagccaccgcgcctggccaggattttgttttatcctaaaggaagtcggaagactggaagaggctgctagagagttgagggtcctcagaggttgatgaaatcatagaatgagtacaatgagagtaaatgagtgtgagagagctggaaggcaaataaaatcaaagtgccactgtattttgctttggctcccttactttaataatgaacagctgttctaaaaatgtgtatataactagtggggctgggcatggtagctcattcctgtaatcccaacactgtgggaggccaaggctggaggatctcttgaacccaggagtttgagaccaacctgggcaatatagtgagacctcgtctctacaaaaaaatataataaacaaaaatgtacaacaggtagaacagacgaatttatgaaattgagattagttgttttcactgaaaaaagtaagggatctgaaggtgtaaacccaaagacaaattttatttataatttactttttagttgtaggatccagtcatttccagagatcaacgttataaggaaataagataaaaataagtattatagattaagtggacagtgttttctgtgcctttttggcaagtagaagacgaacatttttttccctgaccacataagcgtaagttgctgacaggcagggcgcggtggctcacgcctgtaatcccagcactttgggaggctgaggcgggtggatcatgaagtcaggaggttgagaccatcctggctaacatggtgaaaccccgtctctactaaaaatacaaaaaattagccaggcgtggtggtgggcacctgtagtcccagctactcaggaggctgaggcaggagaatggcgtgaacccgggagacggagcttgcagtgagccgagattgcaccactgcactccagcctgggtgacagagcgagactccgtctcaaacaaaaacaaaatcaaaaacaagtaagttgctgacaagatgtttcataagtccccgtactttagtgtactactaaaatgtagtctgaagattagatatactgtggtgtgtatgtatatatatatgtacatgaaatacagtagtgtatactaaatagagacagggttttgccacgttgtccaggctggtcttgaactcctggcctcaagtgatccacctgcctcagcctcccaaagtgctgggactacaggcatragccaccatgcctggccaatattttgtagttttgagcatagatttttgtacaggttttgtaatatagcttcctaagtttcttgttgctttttttagatagaattattactttaattaacaggctttatttttagattttttgggtacagttttaggtttacagagaaatggagtggagagtacagagttcccctatatcccccaacactcctccacccccgttttcccctattattaatgtcttgcattactatgctacatttgtagtagttaacgaaccaatattgacacgttattaactaaagtcggtagtttacattagatagaatgtattacactatttgtattatacattctatggatttggacaaatgtataatgacatgcatctaccattatggtatcatacagaatagttttcctgctctaaaaatcccctgggctccacctgttcacccgcccccctccccacccacaatatctggcaaccattgatctttttaccatctccatagttaggatttttctagaatgtcatgaatttggaatgtagtatttagctttttcaaatggatttctttcacttagcaatatgcattttaggttcttctatgtctttttgtagctttcaataattcatttccttttattgctgaatgatattccattgcatggctataccacaaatttgtttattcattcacctattgaaggaaatcttagtgttttcattttttgacaactacaaatgaagctgctgtaaacgtttaggtggtggtttttgtgtggacttaagttttcatttcatttgggtcaataccaagmaatgtgctgggtcataggtaagagtatgtttagttacataagaaactgccaaactttcttccaaaatagccgtaccattttgcattctcaccagcagtgaatgagagttcctattgctccatatcttccttagcatttgatgttgtcagtgttttggattttcactattctaataagtgtatagtggtatcattgttttaatttgcaattcccttctgacatatggtattgagtatattttcatatatgtatttgccatccgtatatcttctttgaagagacgtctgattcaaatattttgctcatattttaactgggttgttttctgattgttgagttttaagagtgttgtatattttagataacaggcctctaacaagttaagtgttttgtaaatattttctcctaatcagtggcttatcttttcattctcttagcagtgccttccccagagcagaagtttttagttttagtgaagttaaacttaacaatttcttctttcattgatcatgcttttgttggtatatctaagaagtcattgtcaaacccgaagtcatttagattttttcctatggcatatagtaggagttttatcattttgtgttttacatttaggttgtgatccattttgattttatttttgcgaaagatgtaaggtctgtatctagattatttttctttatttgcaaatatatgtctaattgttctagcaccatttgttaaaaagactatcctttctccattgaattgcctttgctcctttgtcaaagattggtatgaatatatttgtgtgaatctatttctgggctttccattctgttccattgatttatttgtgttttttttttttttgcaatatcacactgtcttgagtactgtagctttatagtaagttttttttttgtttttgtttttgtttttttttttttggagacagggtcatactggcactatcatagcgcactgcaaccttgaactcctgggctcaaacaatcctcccagttctgcctcctgagtagctggttccataggtgtataccaccttgcccggccaatttttatttttattttgtagagacaggatctcgttttgttgcccaggctgttcttgaactcctgggctcaagtgattctccccactgtggcctcccaacacactgggattacagatgtgagtcactgcacctggccttttgttttgttttgttttagcttaaatgcatttcaagccttgtattggtactcaaattgtcctacagtgtcttttaatttgtcctatagttattgatagttttataaacacacattcatgtgtgcactggagcacacagatatcatttttgcttaatgtttgctaaatacttattctgggtatgatactgctcttgaaatttaccctgtgttttaaacatcaggttagggttttatctcattctttgaaaagcttacaattggaatgacagatgttggtacaaaaaccagtggcaacccaacagaaggggaaatttgttggggtgtttcttagaagaatttttatcgttgaccaacataatttwaaaaaaaaagacttataaggagaaagatttttggttttgccctattatttctgttttggacagtaggatgggaagtgatgcctgaagccgaaacttgtgaccaagaaacagcaagcatgaggaccaaaagcaatgtgtggtggatgaagaagtagtagatcagaaagagcctggtttgcttttgagtttctcatacacttaccatatgatccagcagtcctatacctataaacaatttcatcataagttgtgtaagaagagagatttagaagcctggcaatctctcttttgattattaacaaaaacccagggtgttttgactttgaaatttaaatatttatgtacctcacttttgataaagccaatatatgagaatctgaaatatacaaacagtaaattagtgaaactttttttgatgcttttataatatgacttaattttcttttagacttcatgtaacctcccatatactgttttacatgaatttaagtagagttcaaatgataagccaaagagtttgtaattgagcagtttataattgagcagttgtaattgagagtgataaagaaacaggattttaaaaaacttagtaactttaatttcttaagtgagagatgccacataaagtagcattgaatattattcatctttcgttttctttcctttttttttttttttttttttgaggtggagtttcgctctcgttgcccaggctggagttcaatggcgtgatctcagcccactgccccctccgcctcccaggttcaagcgattctcctgcctcagccacccaagtagctgggattacaggcgcctaccaccataattttttttgtatttttagtagagacagggtatcaccatgttggccaggctggttttgaactcctgacctcaggtgatctgcccacctcggcctcccaaagtactgggattataggcatsagccactgctcctggcctcatctttcataattatagattgaacaatgcttatgtcccatgcatagattagaaaattgacacagcacctttagtgtcagtttttgtcatggttgtgggaagtaaagtgattgttctgttctacaagtaggtgttatgaacattttcccccagctgagtgagatttttggcttttttttttttttttggacagggccttgctctcacccatactggagtgcagtggcacgatcatggctcactgcrtccttgaacctcccatgctcaagcaattctccaacttcagcctccccaagtcactgggaccacaggtgtgcgccaccatgcccagctattttttttttttttttcttgagacggggttttgctcttgtcgcccaggctggagtgcaatggcatgatctcggctcactgcaacctgtctcctgggttcaagcaattctcctgcctcagcctcccaagtagctgggattacaggcatgcacaaccacgcctggctaatttttttgtttttagtagagatggggtttcgtcatattggccaggctggtcttgaactcctgacctcaggtgatccacccgccttggcctcccaaagtgccaggattataggcatgagccactgtgcccggccctaatttttaaattttttgtagacatggggtctcygtatgttgcccaggctcatttcaaacttctaggctcaagtagtccttctaccttggcctcccaaagtgctgggattacgtggatgagccaccatgcccagccaatttttggctttctatagggtttttttttttaatttaatttttaatatttttaaatttaatttttaattttttttttgtttttttttttagagacagggtctttctgtgttgcccaggctagagttcagtggctatttactggcatgataatagcacattccagccttgaactcatgggcttgagcagtactcccatctcagcctcccaagtaactggagactataggcacataccattgcacctggcttctatgggtttttaacctgacaaatactgtgtgttcttctaatacatacatgtaagtaaacatggataatgagggctatgtgtgattattccatctaatgttatactagtctaagtgcaatggaagaaattagtgcaaagtattataaaaataacatccatctgttggaaaaaacagtgagcaaaaatgaaaaatatgaagagaaataggcaatgtaatatagtttccaaatctttataaatgaggctattgtagtgataatttttgaaaatgtgtgagttcattgaatacttataaattgactgaattgggccaagacacattctgcctctgtcctcatattaacttataatggaaggaagtatagttgacagtctcacgtatagacatactcccaacaattatgatatttttttctctttctttctaatatcatttgagggatttaggcaaaagacaaggataaccgggatagtggatatacttgaaaataggagaaacaatgaggaaatatgaattcttaatgttgttcatgtaggaagttcagtagttgctgacctcctttgatcgctttgatttttttttcctttacagaatatacattataaatgtaaatctattgtaaagcaaagaaaacaaaaatgaaaagcagtttatttaaactataatgaagcaatcagaggccaggcatggtggctcacgcctgtaatcccagcactttgggaggctgaggtggttggatcacctgaagtcaggagttcgagaccagcctggccaacatggtgaaaccccgtctctactaaaaatacaaaaaattagctgggtgtggtagcaggcacctgtaattccagctacttgggaggctgaggcaggagaatcgcgtgaacctgggaggcagaggttgcagctagccgagatctcgccattgcactccagcctaggcaacgagcgaaattccatctcaaaaataaataaataaataaataaagcaaacagattgtattattggattatgtgcccacttgtacagtcagctgacagctttttacctgttactttagtagggaattacaggtcctcaggaagtttagagtataggtgtctttgctttgttgtataattggtgataataaccaaacatttgacatttgttctaattctcttaagttttctttctttctttctttttttttttgagacggagtctcactctgtcactcaggtgggagtgcagtagcacgagctcggctcactgccacctccacctcctaggttcaagctattctcctgcctcagcctcccgagtagctgggattacaggtgcctgccaccacgtccagctaatttttatatttttagtagagacagggttttgccatgttggccaggtggtctcaaactcttgacctcaggtgatctgcctgccttggcctcccaaagtgctgggattacaggcgtgagccaccacacctggccttcttttcacttaagttttaaggaaaacatttatgaaagtgaaatataagtgtgtgtttagtatgtgattggtgatagcagtatttttttttttgttaagaatactcacatggataatcaaatatagcatcaaaattatctcattgcaaacatttgtgttgggctcagtcctgaatttggacactgcagaattctggtagagatgaatgttacgcttaagatttttttttttttttgctttattttcactttggggttctgcaaaggatctctttttggcactctgtcattgcatactcagcatacagcaaaaaccaccaaaagtttagcttttcagaactttaggactacttaataccaatagagttttggaagttccttcatagaggttgtctgtgttgattggtaactgaagattacataattcttgctagtgcttggtaaatgcttggataggggaatgggggagtgaatagtctaatttcttataagttttggcgaaattaaaaggaagagcttaaaattaaatcatcctcagtttctttaacttgattttagcactgctmtgtatttctgttagccagtgatgaaaaacaattgtctttctttttggtcatagatacattactagaagaaagcattctatattaaaggcttgtgtgtttcygtagcttctatggtttgcagcctactgagcttatgatactatgtgaataactaatccagatggttraactattggaggatagaaaaccaaaacccatttcagaagctatgcattttgctcacctttggataggattcattctaattggtagtgactttctgaatttgtttcaaaatttaatttttaactacatgttttcttgatttttacctaggttacaagatgttcacctaagattgagacctagtgactacatttcctacgggaacaaataaatggtttttcatctcccggagatacattrcaaacaaatatggtgctaaaagaactccttacctttctctgactacaatttatttggacatacttttgtattgaagagaggtatacatactgaagctacttgctgtactataggagactctgtcctgtaggatcatggaccatcctagtagggaaaaggatgaaagacaacggacaactaaacccatggcacaaaggagtgcacactgctctcgaccatctggctcctcrtcgtcctctggggttcttatggtgggacccaacttcagggttggcaagaagataggatgtgggaacttcggagagctcagrttaggtaagcacttggttatgtcagtgacttctactaacaacaatacctatgataagctttggtgtgtttcaagacaagccgtttatagttttacaagaaatttttcttaaggagaacctgttgttaagaaataatttgtgaaggggcactatagtcattatcaattatttgttatccaaggctcatctctctttatgtgtgtgcgatgggcttttaagttttctaccagttctgagattttctgatgaacatagagttgcatacagatatcagtaaaatgcagactctgatttaggatgtctgaggtggagccccaaattctgcatatttttacaaattccaggtgatgcagatgctgttggtcttttaagaaggacataaggccttggtttaattcagactctgcccctgaaaagaaaagagtaaatccttactcagtaatacccaggcttagtctgcaaggatatacagtacatcctgtttggagaaattttccaaaagataatttgtttgcgtttcttcctggagtttccagcattagaattaagttagaactccaaggagaagttaggcaattttatttcccaactaaggcaatggattttctatttcaattatgaatttatgggtgagatggaaaataatgacaaaattaatctgtctaaaaatgtgagattgggaagaaggtacattgggtatttatatatatatataaaatttttttttttttgagatggagtcttactctgtcgcccaggctggagtgcagtggcgcgatctcggctcactgcaagctctgcctcccgggttcatgccattctcctgcctcaacctcccaagtagctgggactacaggcatccgccaccacgcccggctaattttgtttttgtatttttagtagagacagggtttcaccatgttagccaggatggtcttgatcctctgacttcgtgatccgcccgcctcggcctcccaaagtgctgggattacaggcgtgagccaccgcgcccggccatttatatactttttaatggctctcccttgatgagtgggatagagaaaataaaaggccgtataaatatatgaagttggaaattagcctggagaatgtggaaaggtcatcttttaggctaaagtgttttcttttccttcatagctcttgagactgtggattaatgtgaagactcattgtaagaaactttggccctttggggggagtggtgggagggtgggaacataatgtaattatgtttgttacctctgctacttctttttctttttgagatggagtgttgctctgtcacccaggctggagtgcagtggtgcgatctcagctcactgcaacctcctcttcccaggttcaagtgattcttgtgcctcatcctccagagtagctgggacttacaggcatgtgccaccatgcccagcttattttttttttttttgtatttttgtggagacgggctcttgccatattggccaggctggtcttgacctcctggcctcaagtgatccacccgcctcggcctcccaaagtgctgggattacaggctgagccactacgcctgaccacctctgctacttgtgatggtcctgcatagagaacatggacaaaatcttatctctgatcccccatagagagccttggagaaacatcactatactagccagagaccatttgaatttaagaatgatgagaatggatttatttttactgttagaaggctgacaacctggaaattcaggacttaattaggataatgaaaggatctttatatttagaattgtgttcgggttaccaaagccagcagatgctacttacaatacgagtaagatgtgtaattactgctttactttctagcaatcacagagttgctttaacgaatagttctgtgaatatttctttatgtcataaattgactgtaacatcacagtactacttggatggattaaataattatgacataaacatccataaaatgattgctaagaggcagtttctaaagcatctaaatctttgaattctcaaaacatcagacaattgtttcatttctgtgaaagtgaagaaaaaccttggtgaattaaaagtggaaatctgtttaatcactgaagtctagatttgtattataagtttacgtgggaagggaaaaattcattcagttaaaagcatacatttatagcccatatatattttcagagtagtattgtgttttgtttcctctttgaatctgagataattttgatgtttctcatttggacttgcctgtagtcagaagaacttgtctttcttttcatgtgcttttactcttctctgcttatcaagttttcattagccctgggaccatactgttatggccttgtatctagaaaagatactttcagaattatctggcatcttcctgacaatagagtgggctgcataccccattccgtcattttcttgttctaatattagcgaggagaagattgtaaactacaaaattccaaagtcaaggcaggtgcagtcagcctacatcatggctaccacctacaaagctctgcttctctaaactaatttcctttcctagacacacagtctgtcaaacagccaagtgcatttcttcttattctttttttttttttgagagacagggtcttgctctgttacccgccctggagtgcagtggcatgatcatagctcacgcagcctccaactcccaggctcaagcgatcctyctacttcagcctccttaatagctagtgcataagaacacgcccagctaatttttttatttttaaatgttttgtagagatgatgttttgcaggctggtcttgaactcctggcctcaagcgattctcctgccttggccttccaaagtgttgggattacagatgtgagccgccacacctgaccaaccgtgtgcatttctgcttcagagcctttacacttgcaattccttctgcttgcagaattatttccctaaaattttgcgtagtgggttgtttctcatcctttaggcctcagcttatgtcttaccttctcagagaaacattctatcacttgttcctcattctcatttaaaatagcacgtttcttctctagcacatcctgtctcgtcaaactgctttattttattcattgcattcatcactatctgaaatgaccatatgtatgtttccctattaattgcctctccttacttgaatataagccctttaaagggcagggattctttctgtattgtttactgttatttatgagatggaaggataaaaagctgatgaataggaagaggggggaaaataaagcatactttctttgggctccaggtttatgtgggggtggtggtagatagtagacctatcggttccaaacagcaaaaaaaaaaaaaaaaaaaaaaaagtaacgatagtgcattttggttctctgcaaatgtttccaccccattatacagttttcttttttttttttcttttagatggagttttgctctttttgcccaggctagagtgcagtggcacaatctcggctcactgcaacctctgcctcccgggttcaagtgattctcctgtctcagcctcccaagtagctgggattacaggcgtgtgcctccatgcccggctaattttttatttttagttgaggcagggtttcaccatgttggccaggctggtctcgaactcctgacctcaggtgatctgcccacgtcagcctcccaaagtgctaggattacaggcgtgagccactgcacccagccttcatcatacatttaacaactatttcttgaatatttactgatactagactctgggaaggatagaaataagaagatatagtttttgtctctacaaataccacagtctagtggtagacagagaaaaacaaattgcaatacaaagtgataatatagcagattgggggctgggtgtagtggcttatgcctgtaatcccagcactttgggaggccaaggcaggcagatgacttgagcttaggatttcaataccaacatgagcaacgtggcaaaacctcgtctctacaaaaaatacaaaaattagctgggtgtggtggtatgcacctgtagtcctagctacttgggaggctgagatgggaggatggcttgagcctgggagcctgatgctaccatgagccaagatcacatcactgcactccagcctgggcgacagagtgagaccgtgtctcaaacaaacaaaaaaccagattgtatggaaactacattggcagagaaggttaataaaggcttcaaagaggaggtatgatttgatgataggacaggatttctgctggtagacataaggaagaagagcttgtgcaggatacacaatcactagatactgtgcaagtgcccagcatatcacagcagcatttagttatacatgactgggtcataggatgtgaagtgaaagaaaagtaatagaatgaagcttttaggtaagttgggacgaaattgtgaagtgtttgcatatattaaagcatttggactttatcctgtaggcaatggggtcgaatcatcaggagttttacaacagagtgacataatctagtttatattccagaaagagaattcgggttgtattgtaagattagatcaaataggaaagaagttgacatcttgtagattttgctctaattgtaatacttatcatgttgtactttattcttccatttctctctcccaagataggtgtaagggtattactttgctttttagtcctcatattctaattcctttcactgtgtgtggtatgtaatgggtactcaagaaaggctgaattgtccaggtcrgaagtagcagggcctttggtcttagctctgaaaatggaagtgagatggagagaggacagggtaaattagaaattttagacatagactttaggcaggatttagtcactaattatttgatgggaagaagtcaaagatgactaaatgtgccagcttgaagagaccttataaatgaggaagatgtaaacccatttatgccggaagctgcaaatttttttgtgaaaaatcagaccttggtgatgacctcgagcagtgtatataaataactcccaccagcctagcgttccaataatggaacactaggcataaatgagttaattgagatagtaaatataggactagggagagtggttgggaaggcaggtaagatagagtttgtgaatatttgaggactgggtgacacatatgcagaaatgcatatctgagacttagaaagttaggcttgagatagggattaagaaatcacaccaaactagagatggggtttcaccatgttagccaggatggtcttgatctcctgaccttgtgatctacccacctcggcctcccaaagtgctgggattataggcatgagccaccgcgcctggccaccccccgaccctctttttttttttttttttttttttgagacgaagtttcactcttgttgtccaggctggagtgcaatggcacgatcttggctcactgcaacctccgcctcctgagttcaagcgattctcctgcctcagtctcccaagtagctgggattacaggcacctgccacaacgcccagctaattttttgtattttttgtagagacggggtttcaccatgttggccaggctggtcttgaactcctgacctcaggtgatctgcctgccttggcctcccaaagtgctgggattacaggtatgagccaccactcctggcccttccctatctttttaaaatgagccatgtgtattttgtaatcagcaaaaagtagtaatcaaagcaaaacaatttcattaaagcaaatttttttaaaaagaaaatacacttattgcttaaaatttttttttaattctactttagaggtgtctgtggagataaccagtaatgatggtttaattttctacagctcaaaaatgtgtattaggacatattttagaaatgcaatcaaattgtgctctaagcttcctcttatggctgggcgtggtgcctcatgcctgtaatcccagccctttgagaggccgaggtgggcggatcacctgagatcaggagtttgagaccagcctggccaacatggtgaaaccccatctctactaaaaatacaaagaattagccgggcttggtgacggacgcctgtaatcccagctactcggaaggctgagacaggagaaccagttgaacctgggagatggaggttgcagtgagctgagactgcaccactgcactccagcctgggagacagagtgagactccgtctcaaaaaaagaagcctctttttattgcttaatagagcatgaacatcttgtttcaacttaaatatatctcatcaattttaaatatttctatagtattcaatttagccattatcaatatacacaaaaattattttgtattttaatactataattaatacagtactcctgcagtccccaacttttttggcaccagggacccatttcatggaagacaatttttccatgtaccaggggtggaggatggtttcaggatgaaactgttccaccctagatcatcaagtattagatgtaggctagatccctcacatgcacagtaatagggtttgcactcctgtgagaatctaatgctgccactgatctttcaggtggcactcaggtggtaatgcttgcttacccactgctcacctcctgccatgcagcctggttcctaacagggccacggactggcactggtctactcgatctccttgtatttaaagttggtttaatttcttagactacatcctggaagcgtactttttgtgtcaaaggatatgtacgtttgcaattttgttacacattgtcagtttgccctccaaaaagatgtttcactttgtgtgtatgtgtgtccttgtgcttatttcctccagtgcttcagaaatcttaaacaatatcaagaatcttttcatctatgacagtctgataggggaaaatggtattacttaaatgtgtatgtgttcataggtgaagttaaacatacttacacatatttgcttatttttttaaagagtatttctatgtggcctttgctcattttcaatggaaagattatttctgtggagtcttttgtgtactgcctcaatgaaaggagaattatgaagatttaagacagaagggaaaattgatggatagtgattgtgtaggtaggaggacatgatgggatgaaaacagattttatagattgatactaactgaaaatcatggggaatcttgtgagaactttctcatttttaaagttttgagccttctgctgaatcaggcctggaaagaatcatgtaaacattaaaataaaattattttcctctagagttaagaaaatatacatcctcaatgtacaaataattgctgatgtttttcttagttgcaagaataagtagatagatgatatttatttatttatttatttatgagatggagtctcgctctatcaccaggctggagtgcagtggcgcgatattggctcactgcaacctctgcctcccaggttcaagcagttctcctgcctcagcctcctgagtagctgggattacaggtgcccgccaccatgcccggctaattattttttgtatttttttaatagagacaggtttcaccaagttggccaggatggtctctatctcctaagctagtgatccagccacctcggcctcccaaagtgctaggattacaggcatgggccactgcacctggctggtgatatttctttcacatccacataggggtgcacgtatgtttatgggagacctgttagactagagagacaggcgtatgattttaataatattcatattatccttttgaagtaggatagagtgagaggatgtttttacttgcatacaacaaaatggaggcacaacaaattaacctttttgatcttttccatctttggtgtctgatgaaatatgcaaaaatgcattaacacaggatacttctgacaaaggtaaataaattggctaagggtagcagcttgttctgtgacactcctgcatggcttctaaagtaagacacttatttctgtgattgatgtaggatttatatgacaggctctgcatattgttctttccttgtctgaattactgaactgtcacttgtgaacttaaattggaactttttttttttttttttgtgacggagtctcgctctgtcgcccaggctggagtgcagtggctcgatcttggctgactgcaagctccgcctcccaggttcacaccattctcctgcctaagcctcccgactagctgggactacaggcgcctgccaccaygcctgactaatttttttttttaatatgtgtatttttagtagagacgaggtttcaccatgttagccaggatggcctcgatctcctgaccttgtgatccacctgcctcggcctcccaaagtgctgggattacaggcgtgagccactgcgccctgcttttattggaacttttaacttctgctactagcttttctttttttggcagttgtaattattaacaatttacagatgaatactatctaaagcagttcatttcatattatatcccacagtcttagatccattattttccactccaagtcaatgagaaaagaaaagtgagcaggcagaactctccatgttatctgttttatacattttatacatttgagttttcaataagattttgtttgaaaggtatgattctgctgctttaaacatttttgaaaatcatctgagagaatgcaggcttaagatgaaacataattttattttattttatttttgagatggagtttcactcttgttgcccaggctggagtgcaatggcatgatcttagctcaccgcaacctccacctcctgggttcaagcaattctcctgcctcaggcttctgagtagctgggattacaggtgcccaccaccacacccagctaattttttgtatttttagtaaagatggggtttcaccatgttggccaggctggtctcaaactcctgacttcaagtgatctgcccgcttcagcctcccaaagtgctgggattacaggcgtgagccactgcacccagaccaaaatgtaacataatttaaaggtatttcttctctagttcaaaatgaagccattttaaaatcaaatttttgcttttaagttaatagtttcttagaaaatcatggtattttaaacaaatgaaagtgtatcagccaaacacctaattaaccagaaacattgatatatatttgtaaccttgttaaagttttcttataaatttacaaatttttaggttctgtggatggaacaaactaaaacaagttttagaagtcatgtcattcttctgcttaagtgattaaaaataggagtcttggctgggcatggtggctcacgcctgtaatctcagcactttgggaggccaaagcagacagatcatctgaggtcaggagttggagaccagcctggccaacgtggtgaaaccccgtctctactgaaaatacaaaaattagccaggcatggttgtgggcgcctgtaatcccagctactcgggaggctgaggtgagctgagatcgtgccattgcactctagtctgggtgacaagaacgagactctgtctcaaaaaaaataaattaattgaattaaattaaattaaattataactttagataaaatgcattctaatttttttgttgttatgtggatatattccctaatggtgaagtctgggtttttttgtgtaactatcacctgaataatatgcattgtatccattaaataatttctcatttctcacctctttcccacccttttaagtcttcagtgtctattattccacactctgtgtccatgtgtacacattatttagctcccacttataagtgaaagcatgcattttttgattttctgtttctgagttgtttcacttaagttaatggcctgcagttccatccatgttgctgcaaaaaacgtgaaattttattatttttttaagggcggaatagtagttcattgcctgtctgcctgtgtgtgtgtgtgtgtgtaaaatgtgtgtgtgtatgtgtatgtgtatatatatatataaaatcatccatgagggacacttgtttccgtatttttggcgataaacataacatatgcaggtgtctttttgatgtaatgatttcttttcctttgggtaggtacccattagtgagattgcaggatcaaatggtggttttagttttttgggaaacttccatactgtttttcataaagggtgcactcatttacattcccgccaacagtgtataagtgttctctcttctctgcacccatgccaacatcttttattttttgactttttaataatagccattcttaggagtgtaaaaggcttattggaaaaaccaacaaaacaaaaaataataataatagccattctgactggtataaaattatatcttattgtggttttaatttgcatctctctgctgattagttcttttgagcgttttttcatatgcttcttggtcatttgtatgtcattcaaatgtcattcaaatgaagtcatttgtatgtcttcatttgaaaaatgttcatgtcctttgctcacttttagatgaggttatacggttttttgttattgtttgtttaagttccttgtaaattcttacaattagtattgtaaatactataatatccttgtaattggatattagtttcctgttagatgcagtttgcaaatattttctcccattcagcaggttgtctgttcactctcttatttcttttgctgtgcagatgctttttagtttaattaagtcccatttgtctattttgtttttgttgtgcattttaattttcttggaagaatatcaaatgtatatgagattcttgtttgtagtagtatcgtagtttaaatttcttttggaattacaccctagtttaacttaagcacaatttgttaaggttaagcagttttaacagatcttggagaagaattatttctgtcaatagcataatccatcaaaataaagtagaaatgaagagttctaaccacattaggtgacacacagtctgcattgcattaatatggtaattttagaagtgtcacagatacaatacttgcaagattatgcattgacatcttgaatggttaaccagaagaatgtaatggtaaaatttccaggcttgccaaacaattccggaattttttttttttttttttgatacagagtctcacttgttcgcccaggctggagtgcagtgttgcaatctcggctcgctgcagccttcatctcctgggttcaagtgattctcgtgccttgcctcagcctctggagtggctggggttacaggcgtgcaccaccacggcyggctaatttttgtatttttagtggagatggggtttcgccatgttggtcaggctggtctcaaactcctgagatcaggtgatctgcccaccttggcttcccaaagtcctgggattacaggcatgagccaccatgtctggccacaatttttgaggaggactatgaaagtaggatggttatgggcaacagaagtttatagaaagatgtgtttatgagggtgattcagaagcagtatttacatgatgtcatcatgcatcctaaggaaaaaactgtctgaacttatggcctacttttccagaaggcggcaaagcttttgtcaaagaaagtggagcttactgccagctgttgtgggctttcaaagagcaggtgatgctggattgattcaattttttttttctatgttggggttactaggacaagaggaaatatatatatatacacatgcacacaaacacacacacacatacacacatatatatatataactttataaagtatcatgtaatattttttataatttatctttaattccaataactaggttacatagattctaaagttctgaatcctataggcaagtggttcaattattttatccatgtcgtctagatacctccttatttctaaatattatttcttaattttttcaatattagatgttgttattgattgtctcacagatgccatccctaatgacgtacataccttgcccatattctcccaatatacttatgtcatattttttggttcaataatttttttacatttacagctttatggctgtggaagtattgtttacaaccaatctatgagagcactgttactgtatttcctttttagtatgactccatcattccttccctcagaattaaaaattgctgatacttgatttttaaaaaaaattcttagttatcaatatacctttcattaattttttttcctcaagtccaacaattaaaaaatttgtcatgatattaggtaattctgtgtttagattccttttctgctggatggcttagttttgctaagtcatttaccatttgtttattcaattctcatcttccaaaatgttgacatctctagtctactgtttcctcacctgttctctttgtcctttcttgtttcctttgtcctttcagtggggttttggaaataaatagagctaaatgtctcaatttttttctgccatgttaaactagatgtctatgttatacatttttatttcagcagggcatttatttgacatacttttgtgtattctggtaacatatagaaatgtgcggtgactgaaaagataattaagtagatttgtcattcctttaaccatcttcataaaagagaatgagttaatggatcattgccctcattgatgctaaacagtagaattctgtattttggtcctatccacttcaacagtgaattggatcaaacctttgaagaacatactgatgaaagctgtacacaacacagtgctttgggtggggcagctaatatgtattgctggttaacagaatcaagattcagcattatattaaataagcaaagagttgaacaaaagtcctaaccatggttcacaaaccagttctactgtacaattttagatttgacaactagattagcaaaaattaatatgaaaaagatgactgtaagtttagaatgagrcaagaatggtcccaggcttcccaaaagtttatggtaactttgagtaacttaatatgtgaagtccagatcaacaaaagtagttaagttttagacttataaggaactttagcattgtctagttcaactgtcatcgttttaaagatgagagaaattaaaaattaagtgacttggtctagggagaacaaccagcttgtcacagaattggaactacagcccagatccaagacatcacaagtagctatttctattatatgccatgtagtcttaccggttactggttaaatgtatagttgraataccacaagccagaaaaaaatagttacaaaagacatcagaataaatgtctaattataatacaaagatgatagtcattagcatttaatataattacatgttaccagaaaaagaaatataaataaagtataaaatgataactaatgatcttttaagtgacaccatctagtttttatggtggatcatccccaacattaatcgtcagagattttccagggggtgaggaggaaaaacattggtaaattaattattgtgaagtttaatattatactattgcaaagtaaatttagagcagaatcaaagtggaggatgttataaacactatgcctctttcaaataaaaggctaggggtagatttccataattacctagccatttattcatttaacaaattgtattgagcatctggttttttggcaggcatttagctaggccctgggggtacaaagatcataaataagacatggaccctgcttttgccaagatcattatttggggattcatacttagaaattagtaactatactgcaatgcagtaagtaaaataatagaagaaatatataagataattagcttatatatatttataattctaagtgttttttgattaaaggactattccaggtagtttgggttaatgtttgtactgtgaaactagaagttaacatgttaacaatatgagttaacaatatattgttaacaatattgttaacaataacatgttaacaatattgttaacaataacatgttaacaatatcagcagagtggggtcctttttgagggttgtaatgctactttttatacttgttagtcttccaatgtagcttagaaagagtgatatctctgctggaattggcaaatggcagaaaacctgcacaaataagacactctgagttgaacctttaaggctcgagctgggcagtaaggagaaagggctggggtccgggggtgagaacgtgaaagaacattctcaaaagaggaagccgcaccatacaaaaggcatggaggtgtgaaacacaagaaaatgtaaagaacctcagcactgctggaaagcatgggtgacttaagatccacaggggtcgttcagtggaattggtattaggaagtgaggccggagatgtgagcaaagcctgttcttgatcatgatagagattttggactttattgtgtaggccatgaaaaaaggaggaattacaagtcatcgttttttttttttccccttcttggagaagataaattaactagagtgatctcactcccctttcctccaaaatgtagtttttctgtgcttttagaaaacatggagcaatctgtttttatccagaggtgttcatagctaaagaatagtaggatttttttccagtttatcagggcaaaaagctgaaacagtaaatgctttgtgatttaagtaattctaaatgttttttgattaaaggactattccaggtagtttggattaatgtttgtttgtactgtgaaactagaagttaacatgttaacagtatctcagcagagtagggtcctttttgagggttgtaatgctactttttatacttgttagtcttctttattttataaagtacttcagcaaatagattaacctaaatgataaacagtttttttggatttgaacatctagactatagacaggtttaggataattctaatttatggagcttttttgttttgttggtttgggcaattttttttggtaggcaatattgcaatgtcatcacaaaaattagaacaaagactttgttcaggtatgtgtgtaccttgatataaatgttggatatactttgggattcggcttttttattaactacattgctatgtggttttcatgattataattttaatggctacattctatttcttcaagtggagtactagaactgttaaccataaaattgggcttccagttaaatctagattttattataataataaataacaataaacattttcatgaaaatagaggttattataagaaatgtatcttcctctgtagcttctggataaattttattttgtatagattgcacagaaaatttatacattgatgatacaactatatttttcaatagttttattctactctaaaatatttgtattgaggagtcaaggctaaatgtggaatttttcacaaaatttgtatacagtataagttaacagtaatatgaattagaattataaattatatttgctgaaatttttagctgtgtcttagtaaaactttcatatgatatcacttgtgttaataagctccagctgtctggaacaaggctgaggactaggaaacaaatcaaaataataataaaaattaaaaatatcttagccaaaatagttccctagtagacatttaagagatactaatattattctcattaaaagacataatatgtttctggggatagatcatgagagaagaggtctgaatctagtattacacaaaagtatatatattnnnnnnnnnnnnnnnnnnnnnnnnnnnnnnnnnnnnnnnnnnnnnnnnnnnnnnnnnnnnnnnnnnnnnnnnnnnnnnnncttaaaaaaaacaaacataaggatgaatcttactgccctcatatttgccagtggattcttagttatgataccaaaagcataaacagtagaagaaaaaaacagataaattggatttcataaaaatttaaaacttttgtgtgacaaagaacaccatcaagaaagttaaaagttggctaggtgcagtggctcatggctgtaatcccagcactttgggaagcagaggtgggtggatcacttgaggtcaggagtttgagaccagcctggccaacatggtgaaaccccgtctctactaaaatacaaaaattagctgggtgcgttggtgtgcttctgtaatcccagctactcaggaggctgagggcagaggtgtgtggatcacttgaggtcaggagtttgagaccagcctggccaacatggtgaaaccccatctctactaaaatacaaaaattagctgggtgtgttggtgcgcttctgtaatcccagttactcaggaggctgaggcaggagaattgcatgaacccgggaggcagaggttgcagtgagccaagatcacaccactgcaatccagcctgggtgacagagtgaggctccgtctcaaaaagaaaaaaaaaaaagaaacttaaaagtcagtctacataatgggagaaaaatatttggaaattatgtatctaacaatgggctagtattcagaatatatagaagactcttacaactcattcataaaaagacaacccaatttaagaataggcaaaggatttttttttaatggtcactttagatacactttttgtttgtttttccataggttattggggtacagatggtgtttggttacatgagtaagttctttaatggtgatttctgagattttggtgcacccatcacctgagcagtgtacactgcaccctatctgtagtcttttatcccttgtccccctcccacccttctgcccaaagtccattgtatcattcttactataagccaaagatttgaatagacttttctccagaaacaatgtaaggatgactagtaagcatatgacttgatgctcaacattgttagccattggggaaatgcatatcaaaaccacagttaccatttcataccctctagggtgactagaatcagataacaattgttggctaggggggaagtgtagaaatctgagtctttatacactgctcttgggaatgtaaaatgctataaccactttggaaaacagtctgacaatttctcaaaaagtggcagcaccccaaatgtttatcacctgaagaaataggtcaacaaaatgtggtattattagcccataaaaatgaataaagatacatactactataacatagatgaatcttgaaaacaggttaaatgaacagatccagtaacaaaaagaccattgattttgtgattccatttcatatgaaaaattcatgggagactgagaggcgggcggatctcttgaggtcaggagtttgagaccagcttggtcaacatggtgaaaccctgtctctacaaaaagatataaaaattaaccaggcatggtggcacatgcctgtaatcccagctacttgggtggctgaggcactaattgcttgaacccgggaggctgaggttgcagtgagctgagatcgtaccactgtactccagcctgggcaaccaactgagaccctgtctcaaaaaaataaaaaataaaaaattaggtcaggcaattgtgtagagatagaaagtagaggctgggcatgatggttcatgccggtaatcccagcactttgggaggccaaggcaggaggatcacttgaagccaggcatttgagaccaacctggacaacatagcaagaccgcatctccacaaaaaatgttaaaaaaaaaaattagccaggcttgatggtgcatgcctgtaatcccagttacttgggaggctaaagtgagaggattgcttgagctcaggaggttgaggctgcgctgagcctagattgcgccactacactccaggctgggcagcagaatagacactgtgtttaaaaaaaaaaaaaaactccataaaattataaaatttgccatctcaatcatttttaagtgtacaattcagtagtgtttagtatagttatattattgtgaaatacatctctagaactttttcttttcttttttttttttctcggcacagtctcggctcactgcaacttctgcctttcaggttcaagtaattctcctgcctcagcctcctgagtagcagagattacaggcgctcgccaccacgcccagctaatttttgtattttttaaatagagatggggttttgccatgtaggccagactggccttgaactcctgacctcaggtgatccaactgccttggcttcccaaagtcctgggattgcaggcttgagccaccgcccccagcctagaactttttcatcttgtgaattggaaactctatgctcattaaacaactcctactttcccctcttcccaggtaactaccactctactttctctttttattttttttatttttatagagatggagtctcactatgttgctcagactggtctggaactcctgggccttaagtgatcttcctgcctcgcccttccaaagttttgggattccaggtgtgagctgctgcacccagcccctactttctgtctgtatgaatttgactacttcagatatttgataaaagtggaatcatacagtagttgtctttttgtggcaagtttattttacttagtataacgtcctcaaggataatagtatgtatcagaatttccttcctttggcccggcatggtggcgtatgcctgtaatcctagcactttgggacgccgaggcaggcggatcatgaggtcaggagatcgagaccatcctagctaacacggtaaaaccacgtctctactaaaaatacaaaaaattagccgggcgtggtggcgggtgcctgtagtcccagctacttgggaggctgaggcaggataatggcgtgaacccaggaggcggagcttacagtgagccaagattgtgccactgcactccagcctgggcaacagagtgagactctgtctcaaaaaaaagaaaaaagaatttccttcctttttcaagttgaataatccattgtatgtatatatcatattttgtttagccattcactcatcaatggacatttgggttgcttctatctttgggctattgtaaatggaactaagttggctgtttctgaatgcttagcataagacaccaacagaatagagttttgatttggagggagaagcagcagttctgaagataaaatatgagaaaaggggccgggcgcagtggctcacgcctgtaatccttaacactttgggaggccgagccgggcagatcatgaggtcaggagattgagaccatcctggctaacacagtgaaatcctgtctctactaaaaatacaaaaaattagccgggctatttttatagaaccrcttgaacccaggaagctaaggttgcagtgagccaagattgcgccactgcactccagcctgggcaacagagcaagactgtctcaaaacaaaacaaaacaatacaaacaaaaaaaaaaaggtaagtctgagtggaatgactacctattttgccctggttgtcctgggtggtcagtgacgattgttatatcagctcaactcacagcttccaaagacttcttgagaagggctgtcttttttcaacatgctgcttggtgaaatgcaaagtgaatttgataagcttattacccttattcagaaagaaagggcttgaacaagctgaaacctttatgtgtgtgtgtgcgcgcgtatatacgtgtacttctttttaattaacagtatcgtcctctaatgtaggagaacttatgctttcttatttatcattttagtaaaactaggtcatgtcctcatccagtgtatgaatataccacattttgtttatgcattttgtttatggatattttatttgtttctgttttgttttttttttttttgagatggagtctcgctctgttgcccaggcttgagtgcagtggtgcgatctcggcataccacaacctccgcctcctgggttcaagggattctcctgcctcagcctcccgagtagctgggactacaggtgcgtgccaccatgcctggctaatttttgtatttttagtagagatgggatttcactatgttggccaggcttgtcttgaactcctgaccttgtgatccgcccacctcggcctcccaaagtcctgggattacaggcgtgagccactgtgcctggcctgtttgtttctgtgtatgaatactctatgatccagaaattccactctgggtattcacttaagaaaatgcatatatatgtgcaccaagaaacatatttaataatattcatagcagcattattcctaatggcccaaactgaaaacagcccaaatgtccatcaacagtaggacagataaataaattgtgatatattcatacaatggaataccatctagtaatgaaaaagtatgaactactaatgcatgcaagaaagtgcatgaatctcacggacgtaatcaaggaaaagaatgcagatacatgagaatgcttattagataattccatccatatgatgtcaaaaataagcaaatgtgatttcctacaatagcagtcaaaacagattacctttggttgtgataagtaggagttagtcattgagaggaggtaccagaaaacctactggtatgctgaaaatgttctctttccaaatggtagttacatgggtgtatgtatggatatataaaaattcaccgagctctacagttaacgtttgtgtgctttactgcatgtaagttatacctcagtaaaaaagaaaaagtaggtgtaaacaaaattacaaaaaaaggtggatcatttgtgcaagaggattgaaatttgttttttgatgttaacagtgtatgtcagtgatcttcataccacttaggtggagctgcttcataatcactggatctaaacaaagctgaaaattatgtgccagaccctttaggaaattgtccaaataattaacagtaaagcaagacttaaaaaaaagtgaaacacataggttaacgttgctcctttttacataaatgctttcataaagattaaaaatttttagatgtggggtgtagttgcatcagtgggatctatgaagttctcattatactctgtcttctcctatatgtacattagttgagtacctaattttacataaaaatctacttttatggctgggcacggtggctcatgcctgtaatcccagcacttgggaggccaaggcgggcagatcacgaggtcaggagttcgacaccagcttggccaacatggtgaaaccctgtctctactaaaaatacaaaaattagccaggtgtggtggcctgtgcctgtagtcctgactacttggaaggctaaggcaggcgaatcgcttgaacccgggaggcggagcttgcagtgagctgaaattgtgccactgcactccagcctgggtgacagaatgagactctgtgtccaaaaaaaaaaaaaaatatatatatatacacacacacacacacacacacacacacrcacacacacacacacgcacatacatgcatatatacttttacccctggactgggtgtggtgactcacgcctacaatcccggcactttgggaggccgaggcgggtggattacctgaggtcagtagtttgagacaagcctggccaacatggcaaaaccctgtctctactaaaaatacaaaaattagccaagagtggtggtgggcacgtgtaatcccagctactcgggaggccgaggtgggagaattgcttgaaaccggcggggcagaggttgcagtgagctgtgattgcaccactgcactccagcctgggcaacagagtgagactccatctcaaaaaatatatatattttaatagataataaaataatattaatatattattcaaatatatcaatattaatatattattcgaatatatcaatattaatatattattcaactatatcaatattaatatattattaaatatatcaatattattattaaatatatcaatatcaatatattaaatatatcaatattattattaaatatatcaatattattattaaatatatcaatattattattaaatatatcaatattaatatattaaatatatcaatattaatatattattaaatatatcaatattaatatattattaaatatatcaatattaatatattattaaatatatcaatattgctatattattaaatatatcaatattgctatattattaaatatattaatattaatatattaaatataccaatattaatatattattaaatatattaatattaatatatttattatattaaattttattattttaatattaataacaatatgaaaacttgtagcaggggtaaaagtgtgtgtatatgtattattttatgtatgtacatatgaatgaatgaatgacagggtctcannnnnnnnnnnnnnnnnnnnnnnnnnnnnnnnnnnnnnnnnnnnnnnnnnnnnnnnnnnnnnnnnnnnnnnnnnnnnnnnnnnnnnnnnnnnnnnnnnnnnnnnnnnnnnnnnnnnnnnnnnnnnnnnnnnnnnnnnnnnnnnnnnnnnnnnnnnnnnnnnnnnnnnnnnnnnnnnnnnnnnnnnnnnnnnnnnnnnnnnnnnnnntgttgcctagctgatctcaaacccctggcctcagtgattctctcaccttgacctcccaagtttttggattacaggtttgtgccacagcacccagcctccaactttattaataacatctatatttcctctcaaaacttgcatcactgtctagaatagaggtctatattcttattggcaggaaaatatatttgactattttgtctaatgatcaagttcaagtcactgacgttgcatggttctagttcttccggaattgattgctttaccttgaactctgttcatgattgttttttcactttcaactattttctttttcttttttttttttttttgagatggagtctcgctctgtcacccaggctggagtgcactggtgcgatcttggctcactgcaagctctgcctcccgggttcacaccattctcctgcctcagcctctcaagtagctgggactacaggtgcccgccactaccaccagctaatttttttgtattttttattagagacagggtttcactgtgttagccaggatggtctcgatctcctgacctcgtgatccacctgcctcggcctcccaaagtgctgggattacaggcgtgagccaccgtgcccagcctcaactcttttatttttcaaaggactgttgtaccttttttttcctacctgggtggctgaaatatctcattggtacgtcactctttttcattttcatgggttcccatttgaccttttaattttccacattcatattctagaggtcttcaaataataaatgatccgtctgttctgaaaaagtacttcaattctgtttcagacccataatgaaatatttactgataaaatgatgtaacatctgagatttgtttcaaaataataaagttactgaaattgggtaggttacatgggggaaaatcatatgcctttgaagttatgcataaaaattttaaaaatacaaaaatactttggtatttctctgctgcagaaaatcatactttctagaatgattcactccagtttttctgcccaccactataatatagaacattttacaaattttctttgtaaagcataggcccttgaaagtacatagacactttctgaaaaatggagtatgagtcctgctttgatgctatttataaatgactttcaacttctccctttcttttggccctggctgccttttacctcactccacgtagcctcactttagactttcagatgttagaagcactctcatttttcttactaacagattaatcagaatatcatgtgtaataccttaggaaagttatatagaaactagtccagccactgaccagcttttcattgcaaaatgaaataattgaaactgctttttagaagatttttattgatggctcttattattctttgatcataactcacactaaaaaaattgtgatttaatatacacatagttaatatctgtgtatatgaagtttcatgaaataatattttatccttactgagtataatgtactctgatactttttattttatatattttttctttaaaaaatttggtcaagacattctttaaaatcaatatttgaatgtatttactttatatcccactaatggatcatgttctacactttagaaaacatttgagcattgtctgtcttgttaataataaacatgctgtatataccatcccagtgatattaagctttaataagtttttcttttattataatgtacttattgttgttgataggtaagccctttaaaaaacttgacacaagaaaaaattattcttgccttaactactaatcatttgggaaatgtttctgcatagtatactaatattttaatactattaagttagtaaaagtgaaaacattatctgctttttttctttagagttgtattgctatcgttatcttcttacccctaatcatactgctcacttaaagagatgctctttgggccgggcaagatggctcatgcctcccagcactttgggaggcccagacgggaggctcacctgaggtcaggagtttgagaccagcctggcaacaaggtgaaacccatctctactaaaatacaaaagttggttgggtgtggtggcatgcacctgtaatcccagttactcgggaggcagaggcaggagaattgcttgaacctgggaggcagagtttcagtgagccaagatcatgccactgcactccagcctgggcaacatagcaagactgtgtctccacaaaaagaagagatgctttttgggtggaggtggcaataggccaacctgtcctctttgccctaaatagacatggtaatcatctgagttatataaaagtagttacttgttttaactactaattgcctcaagttcatttggctggattttttacaagttctaggtagtaatttatacatgtactattttcactgaagggcaagaaaatgtgacagctggagctctaactaaacagactgtatgttcctttatcagtatggctctgagaactgagaactcctagttctttgaaataatgcagtgtctgatgaagcttacggtgaatgttgtctctgtaggtgacttacagaaacaggaagtcttcatgcagagggttttatggacagcatcacatccaggactgctgctttgaaagggctgagtttaaatataaagctccaaaaactactgtgtaatgcagttccttttctattaagaataaaggaaccaatagccaggaagtgagcttgggaagcgttgtggattttgtgcaacagatactaaaagctttcagtgcttgggattgtgccagctcatcaatggtacttttctgtccattaaatggctttccttcctcatagttattggtatgcttttatttttatttttttagctgaagcagttatttattttaaatgggcagggttttaacataatctttgtaattaaattcatctggagcaaaatttttgagtactgtgtattatttaggatagtggctgagtgattgtctaaatttctgaaacatggctgcattttgtgttgacctgtaaaattttaatgatgcatttgtgcccttgcaaagaaattcatttgaggcaatgcttagctcaggagacttatcaagtcacctccagtgcctcttaagaaaaagggtaacatgtatttgattcttttggtgcccttagagaaattaagtaaacgcaagctagcattttgtgatgtatcagccactatgttgggtgttacataggcttgtctcacttattatacttctgtgattatactcttttatatacatgtgaaaatagaagctaagaagcattttataatttgtctatcacttttaggtttagtgagaatttgcaggaatgcatcatagtagcgtggaatgatattgtttactctcctaactaagtctgttctccgctaattaagagcatcatttagaccaagcttgttcaacctgtggcctgtgggccacgtgtggcccaggacagccttgaatgcagcccaacacaaaattgcaaactctcttaaaacattatgtgattttttttttttttttttttagctcatcagcttttgttagtgttcatgtattttatgtgtggcccaagacaattcttccagtgtggcccagagaagccaaaaggttggacacccctcatttagacccttccgttttccttatccctcacattacatgtaatccaaacgttgttaggttttccttcaaaataccttgcatgaagatcctattctagtcctcttaggaattattacctcttctctgctataataatagaagtaataaaaattagacttatctagcaccttgcagtttacaaaatatttacacatattctatcatcttcataaagctctgtgaaatagttattctttatatgttctgttataaaaacattttattcatcttctttctaattacctcattcacttctgttttatacattggggccagattaatattttttattttgtttataactgacacataataattgtacatgcttatggggtagagtgtgatgtttcaatacatctgtacattatataataaaataagggtagttagcatgttcatagccttcaatctttatccttcctttgtgataataactttcaagattctcttgtctagctatcttgaaatatacagtgcagtaagttctcacttaacttcatcaataggttcttggacrctgtgattttaagtgaaaccatgtataaagaaactaattttacagtggggtaattgataaaaacaagagttaaggccaggcacagtggctcatgcctgtaatttcagcactttgggaagccgaggtgggtggatctcttgagcacaggagtttgagaccagcctgggcaacatggcaaaaccctgtctctacaaaaattagctggatgtggtggtgcattccaagatttcttgagcctaggagactgagactgcagtgagctgtgattgcaccgctgcactccagcctgggcgacagagcaagaccccattccaaaacaccaccagacctgccttacaagagatcttgaaaggagcaataaatatagaaaggaaagactactaccagctaatacaaaaacatacttaaatatacaaactagtgaaactataaagtaacctcacaaacaagccagcataataaccagctaacaacacattgtcaggatcaaatccatacctatcaatactagccttgaatgtaaacaggctaaatacccccatttaaaagtcacagagtggggccgggcgtggtgtctcacacctgtaatcccagcactttgggaggccgaggtgggcggatcacaaggtcaggagattgagaccatcctggctaacacggtgaaaccccgtctctactaaaaaatacaaaaaaattagccaggcatagtggcagacgcctgtaatcccagctactgaggaggctgaggcaggagaatggcatgaacccaggaggcagagcttgcagtgagccgagattgcgccactgcactccagcctgggcgacagagcaagactccatctcaaaagaaaaaaaaaaaagtcacagagtggcaagctggataaaaagcaagacccaatagtatgttgtcttcaagagacccatgtcatgtaatgatatccgtaggctcaaaataaaaggatggaggaaaatctaccaagcaaatggaaaatagaaaaaggcagggattgcagttctaatttcagacaaaacagactttaaaccaacaaaaatcaaaaaagatagaaggacattacatagtggtaaaaggttcaattcaataagaagacctaactatcctaagtatatatgcacccgacacaggagcacccagattcgtaaagcaagtttttagatacctacaaagagatgtagactcccacacaataatagcagcactccactgacagtatcaaacagatgattgaggcagaaaattaacaaaggtattcaggacctgaactcaacattgcaccaaatggatcttacagacctctacagagctctgcacttcaaaacaacagaatatacattcttctcatcaccacatggcatatactctaaaatcaaccacatatttggacataaaacaattctcagcaaattcaaaagaaccaaaatcatatcaaacacattcttgcaccacagtacaattaaaatgaaggccaaggctgggcactgtggctaacacctgtaatcccagcactttgggaggccaaggtgggctgattgcttgagctcgggagttcaagaccagcctgggcaacatggcgagaccctgtctctactaaaaataccagaaaaaaataggtgtggtgatgtgcacctgtggtctcagctacttgagaggctgaggtggaggattgcttgcgtcttggggaggcggaggttgcagtgagccaagatggggccattgtagtccagcctcggtgacagagtgagaccctgtctcaaaataaataaataaattggccgagttcagtggctcacacctgtaatcccagcactttggcaggctgagacaggcggatcacttgagttcaggagttcaagaccagcctggccaacatggtgaaaccctgtctctactaaaaatacaaaaattagctaggtgtggtggtacatgcctgtagtcccagctactctgctcaggagactgagtcaggagaatcacttgaacgcaggaggcagaggttgcagtgagctgagatcgtgctgctacactccaacctgggagacagagcgagactctgtctcaaaaataaataaataaataaaatacacacatacatagtaaaataaaatagaagtcaagactaagaaaannnnnnnnnnnnnnnnnnnnnnnnnnnnnnnnnnnnnnnnnnnnnnnnnnnnnnnnnnnnnnnnnnnnnnnnnnnnnnnnnnnnnnnnnnnnnnnnnnnnnnnnnnnnnnnnnnnnnnnnnnnnnnnnnnnnnnnnnnnnnnnnnnnnnnnnnnnnnnnnnnnnnnnnnnnnnnnnnnnnnnnnnnnnnnnnnnnnnnnnnnnnnnnnnnnnnnnnnnnnnnnnnnnnnnnnnnnnnnnnnnnnnnnnnnnnnnnnnnnnnnnnnnnnnnnnnnnnnnntaagacatgaaaaaccattcaaaagatcaacaaatctagaagttggtttcttgaaaaaaaaaattgataaataggccactagctagactaataaagaataaaagagagaagatccaagtaaacacaattagaaattatgaaggggatgttaccactgaccccacagaaatacaaacagccatcagaggccaggtgtggtggctcatgcctataatcccagcatttagggaggccaaggtgggtggatcacttgagggtcaggagttcaagaccagcctggccagtatggcgaaaccctgtctctactaaaaatacaaaaaaaattagtcaggtctggtggcgtgcacctgtaatttcagctgctggggaggctgaggtgggagaatcacttgagcctgggaggtggaggttgcagtgagctgagattgcacccctgcactccaacgtgggtggcagagtgagactccatgtcaaaaataaaaataaaaatagccatcagaggccgggcatggtggctcacacctgtaatcccagcactttgggaggctgaggtgggcggatcacctgaggtcaggagttcaagaccagtctggccaacatggcaaaaccctgtctctgctaaaaatacaaaaattagctggacgtggtagtatgcacctgtaatcccacctactcgggaggctgaggcaggagaatcgcttgaacccgggaggcagaggttgcagtgagctgagatcgcaccactgcactccagcctgggccacagagcaagactccgtctcaaaaaaaaaaaaaaaaaaatagccatcagaaactgctacaaacacctctgtgcacacaagccagaaaacctagaagggatacataaattcctggacacatacacctgcccaagactgaaggaagaaattgatttcctgaacacaccaagaatgagctccaaagtccaatcagtaataaataggctaccaaccaaaaacccaggaccagatggattcacagcctaattctactggatatgtaaagaagaactggtgccatttctactgaaactgtttcaaaaagttgaggaggagtgacctatggcatacttctgatcacaaaaacatcaccaaacttctagataaaggcccaaaacacttgtaatgttaaacattgaaataaatgtgggctatacatacatttaagacagattaataaaaacaagataattaccctttttttttggtgaatcagtgagtgatggcagcacaatggtagtgggtaaaatcaaggaataaatgtttgcaaagcaaaaatggtaaggagaatatcctactactgtgcagtgcaaaaacaaatatagcaggctccttgagcacttttgtactgcattgttgattgtcttgcatatgtatgattaccataggctagaattttaattttacaataatttgtattcatgcatttttccaacccacttatcccagttcagggtctcaggttgccagaccctatcccagcagtttagggcacaaggtgggagtcaaccctggaggaatgtcattccgtggcgggatgctgacacacacacccacattcacttatcctgggacaatttaaacaccccagttagctcaaaaacaattgaaataaaaagaataaaaaatgaaatactgtgtgttccctaaaaaacaaacaaaacaccccagttaacctaaggtacacatctttgggatgtgggaagaaactggagtacccagaagaaacccacacagacatgaggagaacrtgcaaactctacacagatggtagttctggctgggaattgattttttttctcatcagtgttataacatgaaatgatgttatttaaggtccttttgttagctatagtcattctactacttaatagaacactagaacttattcttaaaatctcactgtaactttgtacccattgacaaacctttccttattcctcttccttctccctccccagcctctgataaccaccattctgttctctcctatgagatcagctttcctagattccacatataagtgagatgatgcaggatttgtgtttctgtgcctggctaatttcacttaacatgttctccatgtttattcctttgccacaaatgacagcacttcctttttatagctgaatagtattctattgtatatatgtacattttcttttcatctattgatgtacacttaggttgatttcatatcttggctattgtcaatatgctgcagtaaacatgggagtgcagatatctttttggcatactggtttcctcccctcccctccccaattttatttaaaaaataaaatttattttactttatttttttgtagagatgggttttgccatgttgttcaggctggtcttgaactcctgggctcaagtgatcctctcaccttggcttcccaaagtgttggaactacaggcatgagccaccatgtctggctgacatactggtttcaattcctttgaatatatacccagtagtggaattgttgggtcatatggtagttttgtttttaattttttgagaactcttcatattgttttccataatggctgtactaatctacattcctaccaacagagtataaaaatttccctctcttcacattcttgccagcatttgtttttttgataattgccattttaactggagtgaggtggtttctcattgtggtttcgacttgatttccctgatgatttgtaatgttgaacattttgtcatgtatctgctagccatttgaatgtcttcttttgagaaatgtccattttggttttttgcccatttttaaattggattatttggggttttttgttagtgagttgttcaagttccttatatggtctggatattaaccctttgtcagatgaataatttgcaaatattttttccctctaggttgtctcttcactctgttgagaaacttttaaatttgatataatcccatttgcctgttttcacttttgttgccagtgctgtttttctttttcttttcttttctttttttttttttttttttgagataaggtctcgctttgtctcccaggctggagtgcagtggcacagtcttggctcacttcaacctcctcctcctgggttcaagtgattctcctgcctcagcctcccaagtaactgggattacaggcgtgcaccaccacgcccagctaaatttttgtatttttagtagaggtggggtttcgccatgttggccaggctggtcttgaactcctgtcctcaagtgatccacccacctcggcctcccaaatgctaggatgagaggcatgagcctgctttgcttttgaggtcccatccaaaacatctttgcctagagaatgtcatgaagcatttcccttgtgttttattctagtagttttatagttttgggtcttacatttaagtctttaattcattttgagttgatttttgcataaggtgagagataagggtctactttcttccttctatgtgtgaatatccagttttcctagtaccatttattgaagagactgttttccccagtgtatattcttggcatctttgtcgaaaatcagttacctgtaaatgtggagatttatttctgagttctctattctgtttcacttgtgtgtttttatgccagtgccatgctgctttggttactatagttttctaggagatttttgcattgggtagagtgattcttttggctttgttctttttgcccaagattattttggctatttggaatcttttgtggttccatatgaattttaggatttttttttctctttctgtgttgaatgtcattggtattttgatagagattgcattgaatcttgtagatcgctttgggtggaatggacattgtaacaatattcttccgattttttatttttattttttttaagagacaaggtcaggggctgggtgtggtggcttgttcctgtaatcccagcactttgggaggccaaggcgggtggatcacgaggtcagtggatcatgaggtcaggagatctagatcatcctggccaatatggtgaaaccctgtctctactaaaaattcaaaaattagcagggtgtggtcctcatgcctatagtcccagctactcaggaggctgaggcaggagaattgcttgaacccggtaggcagagtttgcattgagccgagatcgtgtcgctgcactgcagcctggcaacagagcgagactctgtctccaaaaaaaaaaaagagacaaggtcttgttttgtcacctcggctggagtgtagtgacatgatctcaaagatcctagactcaaacattcttcccatctcagtctacctactagctaggattataggcacttacccctacacctggctaattaaaaatttttttttgcagatgcagtgtctcatatgttgcttagctgctctnnnnnnnnnnnnnnnnnnnnnnnnnnnnnnnnnnnnnnnnnnnnnnnnnnnnnnnnnnnnnnnnnnnnnnnnnnnnnnnnnnnnnnnnnnnnnnnnnnnnnnnnnnnnnnnnnnnnnnnnnnnnnnnnnnnnnnnnnnnnnnnnnnnnnnnnnnnnnnnnnnnnnnnnnnnnnnnnnnnnnnnnnnnnnnnnnnnnnnnnnnnnnnnnnnnnnnnnnnnnnnnnnnnnnnnnnnnnnnnnnnnnnnnnnnnnnnnnnnnnnnnnnnnnnnnnnnnnnnnnnnnnnnnnnnnnnnnnnnnnnnnnnnnnnnnnnnnnnnnnnnnnnnnnnnnnnnnnnnnnnnnnnnnnnnnnnnnnnnnnnnnnnnnnnnnnnnnnnnnnnnnnnnnnnnnnnnnnnnnnnnnnnnnnnnnnnnnnnnnnnnnnnnnnnnnnnnnnnnnnnnnnnnnnnnnnnnnnnnnnnnnnnnnnnnnnnnnnnnnnnnnnnnnnnnnnnnnnnnnnnnnnnnnnnnnnnnnnnnnnnnnnnnnnnnnnnnnnnnnnnnnnnnnnnnnnnnnnnnnnnnnnnnnnnnnnnnnnnnnnnnnnnnnnnnnnnnnnnnnnnnnnnnnnnnnnnnnnnnnnnnnnnnnnnnnnnnnnnnnnnnnnnnnnnnnnnnnnnnnnnnnnnnnnnnnnnnnnnnnnnnnnnnnnttaattgattcatagttccacatagctgggaggcctcacaatcatggcagaaagcaaaggaggagcaaagtcacatcttacatggcagcaggcaaagagagcatgtgcaagggaactcccctttataaaaccatcagatcttgtgagacttattcactatcatgagaacagcatgtgaaaaacccaccccatgattcagttacctccctctgggtctctcccactatacatgggacttatgggagctatgattcaagatgagatttgggtggggacacagccaaaccatatttcctcccacacactgtgtgctccrattatattctcaatttctttttccactggtttgtttttggcattagaaatgctactaatttttgtatgttaattttgtatcctgtaactttactgaattcatttattctaatagttttttggtggagtctttgggattttctatatatatgattatgtggtctgcaaacaggaacagtttgatttcctcctttcctatttggatgccctttcttttgcctcattggtctggatagggctttgaatactatgttgtataaaattggtgaaagtgggcatccttgtcttgttctagtcttttgaggaaaagcttttaatttttccccattcagtctgatattagctgtgagtttgtcatatatggcctttattatgttgaaatgtgttccttttatgcctaatttattgagagtttttatcatgaagggatgttgaattttatcaaatgtcttttctgtgtctgttgagatgatcatatggtttttgtctttcattctgttcatgtgacgtgtcacgtgtattgatatgcatatattcaagcatccttaacatccccgggatacatcccatgtgatcatggtgaatcatcttttagtgtgttgttggatttagtttgttagtattttgttgacgatttgtgcctctgttttcatcagggatattggcctgtagttttattttgttttatcctggcctggttttggtatcagtgtaatgctggactcagaataagtttagaagtattattcccctcctctttggttttttgaaatagtttgaaaagaatttatattttttctttcaatgttggatagaattcagcagtgaagccatcaggtcctgggctttttctttgctgggggagtctttatcattgcttccatcttattacttgttattctcttcaggttttctatttcttctgactcaatcttggtaggttgtatgtatgtttccaggaactattccatttcttcagatttttaaacatttgttctcatatagttgtcagattaatattgtaaaaatacaactttcaccatttgcttttccccttcgttcacagcaaaccgaagaatgaagttaaaactcctatatttgcatttaggattatctataatcttattctaaactagcctttcttttttatcacccaagaactttctcacaagaactttctacrtatatcaagtcaagttgttcactttagcatctcttacctactgaatgtcagatactatgtttgtttctagggataaaaagatgaattaaacgttactgtcctctggaaatttactgccgagtggaagtaaaaaatatatgcataaataattataggtagaagtttatgaaattgggtgctggcttagtcttaagactagaaagtatatttagaaaagggctttttttttttttttttttttttttggtaaacaaaaaggcataaaaccacaaggaaccaaaaaaatggaagagaaagtgaaaacagactgagaaatgttaacaaaattttggaagctgaaacacagatggttaggtggtaactgacttagcactccagacaaggctgagtgcctgaaggggcaggccggttaatgctataaaatataccagataggcttaggaattggagacactaggaacttcacaaaggtgggatgcagaaggggctaaaaatggaaaatttagttgaaagtcaactgcactgtgaaaagcggctgcccagctaaatgcaggaaaaataaggaaaaggttgcacactgagcctgggagcggtggctcaaacctgtaatcccagcactttgggaggccaaggcaggcggatcatgaagtcaagagatcgagcccatcctggccaacatggcgaaaccccgtctctactaaagatacaaaaactagttggtcatgttggcgcgcacctgtaatcctagccgctccagaggctgaggcaggagaatcgcttgaaccatggaggcaaaggttgcaatgagctgagatcatgccactgcgctccagcatgggcaacagagcgagactctgtctcaaaaaaaagaaaaaagaaaaaggttgcacactgaatgatgagactcctcaagacttcttgtggaagaaacaaatatgtaagtgcccaggatttctttaactcttgnnnnnnnnnnnnnnnnnnnnnnnnnnnnnnnnnnnnnnnnnnnnnnnnnnnnnnnnnnnnnnnnnnnnnnnattacaggcatgcaccaccacacctggctaattttgtatttttagtagagacgggggtttctccatgttggtcaggctggtctcgaattcctgacctcaggtgatccacccaccttggtctcccaaagtgctgggattacaggcgtgagccattgcgcctgactgcatctttttcttcaaaagaaatctatgcacaatttctataatatagtaggtttgtttttatgtaaataaaaagactttatccaaatcttcaaatgaaaattaggatccaagaaaagtgtatcttacttgtcctgtagcttagtgcacaaaggccttggcacacttccaagtacccacaggtacatacctcagagtggggacctggcattggatattattcataacctgtccttagcttagtggatgtttatggcttttcttctgtttcttcccacacactatgtgctccgattatatgggtctacccacagtatatcacatcctgtgcattttctatcatttatccatatcattgttcaaattagtattttttaaaaatagaaaatgccttttattctctcctctgttcatccgtcaggactcacttcaagtgctgcttgtgcccaaattcactaccctccgtatccaagctcttctactgactcatttgtatttctgttttaacactcactatatcatgtgatttatttgacacacttttgagccaccacatacaagaccttgtgtgaggagctagaatacagtctatgaagggtgagaactgaggttgctcatcttagatgtctggtatctgtgtagatgggcattaaatattcacatgcttttccctacttctgttctcttatttttctagttaatcttgtactacctcacaatgctcatgcaaaatcacagatcttatcaggtcataaaacctttcattttaaactttaagatagcattgatgttctgcaattatacaggaagtaggaacagggaaaaatggtattaatggctttttttttttttttttgagacggagtcttgctctgttgcccaggctggagtgcaatggtgcgatctcggctcactgcaacctctgcctcccaggtcaagcgattctcctgcctcagcctcctgagtagctgggattacaggtgcacactaccacgcctgcctaatttttgtatttttagtagagacagggtttcaccatgttggtcagactggtctccaactcctgacctcttgagccacctgcctcgccctccccaagtgctgggattacaagtgtgagctgtaattaagttcttagggttaagcctgtgctaaaattagttggttttgttttgttttttgttgttgttgtttttgagacagagttttgttcctctctcccatgctggagtgcaatggcatgatctcagctcaccacaacctctgcctcccaggttcaagtgattctgttgcctcagtctgctgagtagctgggattacaggtgcccaccactacccccaactaatttttgtatttttagtagagacagagtttcaccatgttggccaggctgttctcgaactcctgacctcaggtgatccacccacctcagcctcccaaagtgctgggattacaggcatgagccactgcacctggccctaaaactagttttaagtcacagtaacaatgctcatttcatttcaggaagagctgtcctgaaaaatctttgcgcagagtcacatctggtgtgcaagaagtcctgggccaaattaaagttttaatcggcctgggaattggctgtttgttactgcctcatctgttcctctcttacttattactatcctttttataatttcatgaaatatrttttaaaatggctttggtgggaacattaataagaaacataaagtaacctttagaaggttaatgcaaacactatatatatgagagaaatgcctatttttgacttgtgctcccctaaaaaagaagttattcatcttatggtttctgaggtgtttgacctaagaaaccaacctgttagtcttctttttatcttacttgcagacaaaaattattcctaaattagtgtactctttgacacgtaaaggtactcgcaatctgatggcagtatgaaaagtttaatgatgtagttatattgcagagggccttctgttgtctagaggtttgtaaatgagaatttgtattgtaagcagctttttttgtttgtttgtttatttatgagatggagtctcactctgttgcccaggctggagtacagtggtgtaatcttggcttactgtagcctacacctcctgggttcaagcgattttcccacctcagcctcccaagtagctgagattacaagtattcaccaccacccccggctaatttttgtatttttagtagagacagggtttcaccatgttggccaggctggtcttgaactcctgacctcaagtgatccacctgcctcagcctcccaaagtgttgggattacaccacacccagcttgtttttttatttataaaaacaatgcattatataaaaatcagaaaatactaaaatagtaaaactattttatattccttttatattctttttcacgcacatatattccgctatgtattacagaaatataacatttactggtatattttaaaaatagttatgctgtacgtacagtaccaataacttttaatcagtcgagattttgagtgttttatatgtgctgaacatggtcttaagcaccatagggtattgagaaaacttaaaatccctatcctcaagatatttacactctagctggataagaaggcaaacgtgtaagaagagatgcgaagttcagtgcagtggctgaactacatgatatgtactaagcactcaggaggaattaaagttaaggcttccaaggaytagtgaggatggggaggtgagaggagctgagtatccagcatatattacaggttcagtaagtgaatgttgttgctctggccctcatcatcattccaagttcttagtctaaacgtctgggaatattgattacatttgtagaaataggaaagtttaaaggaaaaaccgttattgcaggaagaactttgagatgtgtaagtgttgtctagctgaagatctgtttcctgtaaatagttaaagatataagtctgttgttctggtaaacagtcaaaacagctttgagaatcatctccttacaagcagtagatgaattctccaaaagtaggtttgggcaataattggttttattcacactgtcctttatgccatccaaagttgacacgaaataccatgacaaaatatatagaattctatttgccagttagttcgaagaatgaaggtttgtgtttattgtgccaagagctaaaatctctttgaaattctggcatttcttcttgaattgccttgtggcttaatagttgggaaatattaatatgcatgcatgtgtgtgtgtgtgtgtgtgtgtgtgtgtgtgtgtgtgtgtgtaagagagatttgttttctcttttaggaaaattctcaggtatagcttaaatttctaaattttcaagctgttctagccttgctagatctcattatctctgtagcttttcgcttataaatcaagtttcatttatgtgaacagcattgggaatataacctttctcatgaccctgtaagctaatattttgctttgcttttcccagaataaatgtcactaaaacatatacattctgctttcctcttaggtaaaaatctctacaccaatgaatatgtagcaatcaaactggtgagtagaatctgtttgtggtaattaatgttttggtgctcccattgcttatatctttttataggaaatagttttaagcattcattcgcaaaactgctaatggtttggggttttttttgtgtatgatcccacatttttcttcatttatagtgttaacagtgatgaatcactgtatactatataacactatatagttaaatgatactaactttagtgttagcaatgatgactcaaaaattagttgattaaaaaaagctggaagaactagtaactctgtgaacttaatctttcacagaggtatcttaaaaagataaaatcattcaaaaattttactgtttttttctctaacttaactgatttattttttgtacttagaagaaaatcataactgatcatctaatcatggccttaaaaatctgtcaagcatggaaaacataccatatggtcatattagaagcaaagaagtcaattggtatattagtactaaccttgtgaataattaaactagtcatagaaaatgatatcctatttaaaaaagtaataattttattatttttgaggactaataattttaaaagacagaattctttatcttatatttaaggttgataacaaaaccattttttcatgtgaaatgtttcgtatgactagtttcactgaaactctgtgtttgtcctcatagtaagtgtcccaggatttacaggtagctttgttttattagttggaagccagaggagttaatggttgaaggaaattgaaggaaatctatgctattcttttcttttctttttctttctttctttmtttttttttttttggagacagggtctcacagtgttgcccaggctggagtgcagtgatgtgatcttggctcactgcaacctccgcctcctgggctcaagcaatcttcccacttcagtctgcctcctaagtaggtgggactacagactacatgccaccacacctggctaattttgtattttttgtagagatgggatttcatcatgttgcccagctcggcctcccaaagtgctgggattacaggcgtgagccaccacgcctggcattgttattttctaatgaattgcacttaccacatccacacttgttctgtgattggttgttcttctcatccagcttgcttgtggaggagttagggttgtcttgtgaggaactgacagttaccagatttgtttccctacaaaggggtgggtggacagggagcagggcttagagcagcaggtaccttctaggaaaccaagtatttttgtattttgacttggaactcttgttggatagatgggagcaggaagagaggtaatacatgtaacaatgcaggtcaaatatcctcttagattgaatattagaggattaaccgaacagacacagtggctcatgcctgtaattcaagcactttaggaagccaaggcaggcagattgcttgagcccagaagttcaagaccagcctgggcaacaaggcaaaaccctgtctctacaaaaaatacaaaaaattagtcaggtatgctggcacacacctatagtccccactactttggaggctgatgtggaagaagtcacctgagcccaggaagtcgagactgcagtgagctgagattgcttgcacctctgcactcagcctgggtgacagagtgataccctgtctcaaaaaaataatattaaccatattttttaatttataggaatttggttattcttaaaagtgttctctagtacacctgctttttttactttttctgttttattattctgataagttggaataatctttgattatttgggacttctaagagaacaaagcacttcctaaaacactttaaaaatttgctacattactacatatttgttaggctttctgttagggacagttctttcatcttgatttcttctgccaggttataccaatcaacctgtatagataagcttacataacatattgttgacatgattgatcgttacatttcatttcctttttaaaaacttttattctgctttgtatggccactatttaaagctaaaaatggaactcttacaatctagtatggtgtgactcagtaccgcatttctctttcaaataagtctcaaagccattttagaggataacagttttgtctacaggctttcattcttgcttttgggcttctgttctccaaaggaagatatgaaggcagtaattgagctctttggattgtaatggtcaatttgccttaagcactacactcctataaggtagctgtctgctgtttgtttaggattttaggcaggcatatgttttccagaatatggtaaatattctggcaaatgcacagccctctatggaaatgtaatcagcatctggcacagaaatgcaaggaagctctgctgctgctgtttctgttgtactttgtttggatcttcattgtggactcttttttcttagatttcttagatttctaaaaacctttaaaaaaatcgtacacaaagtaaacaaaatagtgtaatgagcccctcctttatccatcacccacatttctagggttctttttaacagaggttttctaacagttgggtttaaaaaaaaatctcctgtgctgctaatattgctgccttctgtagtctgtagactgagttttgcaatgccttctacttatagtgcttccagaaaagcaccttgaagcccaattggctgagcaggctatggccatgtgctaaggagttggctgaagtgtgtaattctctcagtcttcataataagaccctcatgtctgaatatatgtgatgtgtatgcctttcaacccttgaactctatggagttttgcatttttaatttactagcttggctacccaacgtcagattgaatattttctattatgctttccagcatgaagattgagagtataatatttgaggaaggatgtgtggtttttaaaattcattgcctctgtggtttgtcagaatccaaaagcgatttctctggaaagaatagtcccttttctagtgttttgatcgacttctagttccatgttgatttgtcatcactgtttctgtttggttccttgtgaattcttagttattttgctaatggaaaaattctatacctggctgctttgatagtgattcagtggaatatctgcaaccagatggagacataagagtgatatgatacctctctatctgaagagataaataagaaagggactctacagtataattagtcttatgtacttttctttttactgaaagtcttgagacacttgaagtccaactctaatgattgctgattttatactcaaacaagggtatgagttctttcttcatagcgcttcctacagatacaaacattccagtctggcctgaattgatttagagaaaatcttcctagaagcagagggatagactagacaacttcggagaaacttctgaattctttgattaatggattctatatcttaagaaaaatgcagaaaacttcaagtggattcaggaaagagccttcaaagatgatcaaagaattaaaaactaggaccaatgaggaaaggtgaaaggaatttgaaattactttgcctaagaaaagaaagtctaggaaagcctgagaaaagaaagttttgttatttgaagagagctacttaatagtattcgtggttattgaggagcttttttatttttttgctgaggacttaagaaaaataggcttaagtttcagtagtgagatttgagtataatataaaagtgttccaaaccatgaaacttgttcaacatcagcatgaattgtcgagggaagttatggaatctccttccttggagtctgtcttaaacataagacaaataggcggggtgtggtggctcatgcctgtaatctcaggactttgggaggctgaggtgggtggattacgaggtcaggagtttgcgaccagcctggccaatatggtaaaacctcgtctctactaaaaatacaaaaattagccgagtgtggtggtgtgcatctgtagtctcagctacttgggaggctgaggcagaagaattgcttgaacccgggaggtggaggttgcagtgagctgagattgtgccattgcactccagcctgggtgacagagtaagattccatctcaaaagaaaaaagaaaaaaaggacaaataactactcattgggggaaaggacagtcttttcaacaaatgatgccagaaaaactggatacccacataacagtgaagttggattcttactttacattgtattcaacaattaattcagagtggatcaaagacctaaatgtaagattgaaactataatattttactagaatacacatgggaaaagcttcatgacattggatttggcagtgatttcttggatatgacaccaaaatcacagacaacaaaagaaaaaaactagctaagttggacttcagcaaaatttaaaacttttgcacactgtcaacagaattctaaaaagggcaacccatggaaaggaataggagaaaataatattatctaataagagatgatatccagaatttaccattataacagttttttaaagtgcagtggcattggccaggtgcagtggctcacacctgtaatcccagcactttgggaggccaaggcaggcggatcacctgaggtcaggggtttggtaccagcctgaccaacatgcagaaaccccatctctactaaaaatacaaaaattagccaggtgtggtggtgcatacctgtaatcccagctacttgggaggctgaggcaggaaaatcgctgaaccaggaggcagaggtcgtggtgagccaatatcatgccattgcactccagcctgggcaacaagagtgaaactccgtctcaaaaaaaaaaaaaaaaagttcaatggcattaagtacatttacattggtgtacaaccatcaccaccatccatctccagaactttttcatcttccctaactgaaattttgtatctgttaaacactaactcctcattctcccctccccccaaccccttggcaaccannnnnnnnnnnnnnnnnnnnccttggcaaccaccattctgtctgtctctatgaatttgactacactagatacttaattttttttattgtttgtttttttggagacggagtcttgctctgtcgcccaggctggagtgcagtggtgcgatctaggcttgctgcagtatccacctgccgggttcaagcaattctcctgcctcagcctcctgagtagctgggactacaggcgcacgctgacactcctggctcattttttgtattttagtagagacggggtttcaccgtgttgtccaggctggtctcgaactcctgagctcaggcaatccacccgcctcagcctcccaaagtgctaggattacaggcgtgagccaccgcgcctggctactgggtacttaatattaagtagactcattcartatttgtccgttgtaactggcttatttcactgagcatgatgtcctcaaggtttgcccgtgttgtagcatgtgtcagaatttcctttttaaggttgaataatacttcaccctatgtatatacccaattttgtttatccattcatccaattatgcacacttaggtcgcttccaccttttagttattgtgcataataatgctataaacatggatgtacaaataaatctgagttcctgctttcacttctttggagcatctatccagaaatagaattgtaaatcataatgattctgtctttaattttttgaaaaattgccatgccattttccagagcggtcgcaccattttgcattcccatcagcagtgcacaagggttccagtttctccacatcctcatcaacacttgttatttttctgtttttgataatagccatcctaatgggtgtgcagatgttgagctttattttatttattgattgattgagacaaggtctcactctgtcgcccaggctggagtacagtggcacaatcacagctccctgcagtcttgatctctgggactcaagcaatcctcccacctcatcctcctgagtagctgggactacaggagcgtgcctccctgccaggctaattttttaatttttggtagagacaaggtctccctatgttgcccaggctggtctcgaacccctgggctcaaacagttctgccgtctcagcctcccaaagtgctgggattacaggcatgagccaccatgcccgtcctattttatttatttatttgtaaagatgaggttttgctgtgttgcccaggctggtcttaaactcctggtctccagtgatcctcctgcctcagcctctgaaagtgctgggttggcagacatgagccaccatgtcagctactgttgaggttttaaagagagattataatgtgtttagggtaatgtttggttttcttgttagccagttgcccagtacactgtcagtttagaataatcagccagccagttgctcaattggtatagagcaaagtatggttgtttggctgctttatctctgaggtttttagaaaactccatttttggaaacttgaacaccacattgattgaagttacatattttaattgcatttacaatctttaattctcaatagtttaaaaagaaatatacataaggatgttcctaaaagcattgttcataatattggaaaatgaaaacagttcacgtgtccaaaaattatggggagggtgtgtatacatacatacataaatacatatccacatacagggcaatactcaaaccattaaaataatataagccaggtgcagtggcttatgcctataatcccacagcactttgggtggctgaagtgggaggattgcttgagcccaggaatttgggaccagcctaggcagcatagtaagatcctatctctacaaaaaattaaaaattagctgtgagtggtggcacacacttgtggtcccagccactcgggaggctaagataggaggatgacttgagcctgggaggttttgactgcagtgtgcaagaccctgtcttaaaaaaaaaaagaaattatacacgtttatttaccgccatgggaatatgttattacattgttgaattcaatagcacattaatgaacagcaaatatattataatctcatttatataaaattaagttcattagtctatattatatatattaatacatatatagataaataaatactttgaaagacattcactaaaatgttaatagtgcctctctttaaagtgacaggatcacagatgatttttactttcttcctaatttttgtatatttgaattttcttctgagcatgcattatttttctaaaaataataaaaccatgaaccacccaaaattctgaacaaaacaagcaggaaatacattctggtatttttttatttaaaggtttggcatcaagtttcctggcagaatacattccaggagaatatttcattgcaagaaagatatccttgaatgatagctcatgcaaagtctatttttatttaactatccatggaaggacttgtatgtaattcaccttcatcttctcttagctatactgtccaagaccaattgtggttagaaaaggctcttatatatggatattatctctaaaacattgggtgatcttagccctcgtttactccaaaaatttaagaatggaaaaatcccatttgtttaaatctgatcacagtttttctttttggatttcaggaaccaataaaatcacgtgctccacagcttcatttagagtacagattttataaacagcttggcagtgcaggtaagtcaagtcttttctctccacttacttagtatgtatcttagctggaagccctaaaatatacaaatttttttgtctggtttgccctttttaccaaaccatctatctcccctgcttgccggataggtaaataaacatagtcaaccacaaagctacttgcgctctggttcctggagttgagttgacaggggaactgtgttgctatgactatgcccacagaccaacctgcagatgccttccacttgtcaaatactcatagtgtgaaggatttgcttttcagcagttcattctcttttctttacttataccaaaagaaaggaggaaatgttggtaatttgcaaaatatactttaccatactgagatggtttatctgttttgaagacatactaaaatatacattctgaaatattacagaaccgtcattttatccattgtcctcattaatttgcaagagctatccatatgattgtaataacctatgaccttcggcaatttttaaaaattaagttaatcactgtaaaaaatgtttgtttttaccaaaaagctctaatttctcaaatatcttactggcttccagaaaaatgttttgctaatgtttacctgtagggacaagtctctcagaagatgaaatctttcagagctattttcactatttgacattagtagaatttcctctgctttatgcccccttcactgtgacaggttttatatgaatgactaaagcttggtttctattttttttttctttctttctttcttgttttggagacagggtctcactcccatcacccagactggagtgcagtggcacgatcacggctcactgcagcctgggccttctaggctcaagcagttctcctgcctcagcctcctgagtagctggtactgtaggcatgcaccaccacaccaggctaattttctgtatttttagtagagatggggttttgccatgttgcccaggctggtcttgaactcctgggctcaagtgatcctcctgccttcagcctcccaaaatgctgggattacaggcatgagccatcatactgtttgttctatttcaagtaaccctatgaaggtactactgaaggaatttgagttctgcatcctaaaatatttagaattatatgagtcattgtgtgttattcaagttttattataccctgactatagcaataatcagctatagttataacccagggagcccacaatggacttgtctttcattgaacttaatatgaattcttgctmacagtagcctctcagtatatatttgttaattgattggagtgtttttggcataagatttaagactggcaactgagttcacagggtgtatacataacttgaggcttatcttcccacatgccccaggactacattttaattgttgttcctcttacattcctggttttataatgttgttaagttattctaggtttcataagttttagggaaaagactgtcacagcccatttatgataagcatgtttgtatatgtctcataaatccaagggtcaggtaacaacatgcttaatccagtccagcttagaagtttaagtggggaagtggacaggccagttttcaggatttcctctgtaagccctttcaaatagatccaccaaatcagaccaatcttcccttttcaatatagagccaaaaaaaatctaatgtatttgttaggtaggaataacatctgtgctgctgggttggtactcttcccaaatacagaaaattgcaagctcttgaagtttcagcattctctgtgcactgaaagcgaggagtaaacagggagggcattagaggaaaggtgactatacaaattgcttttcacttaagcagcaaggaaaaactggaatctctgagactggtatatccatcattgtcatgagtgggaataggagggctctgttgtactggttaggccaactgttgactcatagtcaggtaggctggccatcgttggtctgtctcccagtaccttttctaacaaacatgtaaaggtcacaaagccttctaggtcctatatgcagttcagtggtgactactggcctcttttctgcttcttgagatcacccactacttctaaaatagctgcggtgggcatcatcttaatacccttgcctgcaactaacaaggtagctgcagacttttccaagataggaagtgctttagttttctgtttcaaatccccttgctacccctacccgctagtgtaagaattacttttaggattttcttacagtcatctaaatcggcttgactacttagttctaatcatagagttcaccactcttcaggctaatttaatgtgggaaagtccagtgtatttgaagttcttcatattaggcccaagtttgccatttatttatatatttattatttttaaaatttagatggagtcttgctatgtcaccaggctggagtgcagtggcactatctcggctcactgcaacttccgcttcccgggttcacgccattctcctcctcagcctcccgagtagctgggcctacaggcgcccgccaccatgcccagctagtttttttttgtaattttaatagagacggggtttcaccatgttagccaggatggtctcgatctcctgacctcgtgatccgcctgcctcggcctcccaaagtgctgggattacaggcgtgagccaccacgcctggccaattttttgtatttttttagtagagacggggtttcaccatgttggccaggatggtcttgatctcctgacctcgtgatctgcctgcctcgccctctctaagtgctgggattacagatgtgagccgccgtgcctggccatattttttattttattttttccagagtccagatgaggaagaacattgggatatttttaaaatcctgattatattatcctattgatgattaggcattgactatttttttattgtaattgcatattggtcccactctccccactccctgccataagattataagctccttgaaaacaagccttgtgtcttctttacccttgtatctcaagcgtatcttaaggcctggtgtgatgtcattctgtcacatagcagtcagcaagtagttcagtggcagaaagaagttagaaagatttaataagcttgcctttttagatttttaccaatgttattaataaaaatattccttgtgatggttaaaaaaaggaaatttattttgaaagaagatcaattgacaagaaaatagacaagatttcaccatgtgtccttgtaaatgtgagcatgaacaccagagcttgtttttaacttagaggcacagcattcctccccctattttttcagagtaagttctcagctgcaagtatgactcattggtagttaatgtttgagcagccagtgcgcatatgccactcttttgattaccaaggtgatgttgcagcattgtaaataaacaaccttttgtgccaaagccacacaaagaccacagtaacataattagtrtttttactcactagtgttttgtctgtcattgttcattactgtccagtgawttataaaatatttggatttcctgacaatgaatacttaaacaaaaagcccattgtgacttaggtttgttcagtgaattaatcattgcttataaatgtatgaaattatttgggaaaaatgattgattatgaatttaaagaatacctattgctgtgatatccagagcttgagacattaaattcctaaaataggaactttttgttgtcctgggactatgaccattttcttcagtacccaactcttaatcattaccttggccttttggaccccagtttcacattgatgacctgatctagaaattcataccaattctctaattaygtagagatagaacaaaaatgacagcactgggtaattgtgaatgtggttctggttggaggtcttccacattgtctctgcttttccttgtgtgatctctaactctttctcttccattccactttgttttctagtgagtggtcacacttttcaagctttgtttcttgattacagttttaccaccaagattttcaagacttaatgcttaagaattgatatctccaagataatcagggaagaaagtaaaggggaccatgagaaccttgaaactgagaataagcattttattttcctgttagctatcattttttcatttcttatagaaaccaaattgtaaaatcttataactatttttcttattttcttcaatcatcaatgttatgttaattgtattatggtcaccataggcaagttttaatttcttttctttttatgggaatgattttaggtttcagtatttccttagggtcttttacttaggaagatacatacattatcaatttaaaaattttccaatccataaatcttttttccagcatagctctcagttttgcttgtattctagcacacaggaacaagatttggtggatgagaggtttggggcagagatatgaaagagtctgtggccgaaacagatccgtattaggaagagtgacagtatgagaatgactccatagctgaccacatgacaacagcgtggtatatgttcgttaattgactagaagatgaataagccagaaccaagcatgcagctgaagtgggaggaaaaagggagggaggggatgagtcagcaaggaccagagcaaatgaaagaggattgagggtttagagggtaggtaaacggcaggataataggattctttgcagtaaatgacaggaaaatggaggtctctgacataacctgaaatttctaagtctaggctcccatatcctggcttcccagcagctattgtaatctagtgactcttctgatttggctctcttataaaggagaagctaatcctcaaattaaaaaatgacaagattcctccccccccccttttttttttttttaaagagacggactcttgctctgattctgaggctagagtgtagtggtgcaatcgtagcttgctgcagcctcaaattctttggctctagtcatcctcccgcctcagcctcccaagtagctgggactacaggcgcaatgcaccatagctggctaatatttttagttttttgtagggatggagtctcactatgttgaccaggctggtcttgaactcttggccccaggtgatcctctcaccttggctgcccaaagtgctgggatcacaggcatgaaccactgtgtccagccttaacaagaccccarttgaaacttcacaaatgcagtagtcaaaacaaaatctcattgggcagagaaagccagttaacttgttaaatacctagtaggcggttcatttttaaaattgatacataatatacctatttatgggatatatgtgatattttgatacatgcatatctatgtgtaattatcaagtcagggtggttaagctactcattacctcaaacatttaccatttctttgtgttgggaacatttcaaatctactcttctggctattttgaaatatacaataaattattgttaactatagtcactctgctgtgctatcaacactagaatttattgcttctaactgtatgtttgtacccattaaccaagctctcttcatcctccccacacccaaccattcccagcctctggtaaccatcattctatatgagatcaactttttaagttttcacatgagcgagaacatgtgatatttgtctttccctgcctaccttatttcagttattataaaggcctccagttccatctgtgttgctgcaaatgacagaatttcattctttttttgtgtgtgtgtcttttttttttttcctttttgtggagaaccggggtctcgctatactgcccagtcaggtctcaaactcctgggctcaaactatcctcccacctcgcctctctgagagctgggcttacaggtgtgaatttcattcttttttatgggtgaatagtatttccttgtgtgtatatgtaccacatttttttgtcctttatctgttaatggacacttaggttaattgcatatctttgctattatgaatagagctgtaataaacatggacgtacacacatgtttttgataaactgattttgataatggctgtgaagatcatttgcccatttttaaatcagattattatttttactattttttgctattgagttgtttgaattgcatatatatcctggctattaattaatcccttattagatacatggtttgcatatattatattttctcttattctactggttgtctcttcactcagttgtttcctttgctgtgcaggagcttcttagcttgctgaaattccatttgtttatttttgcttctgttgcctgtgtttttgaggtcttacctgaaagattttgcccagaccaatgtcatgaagcatttccccaatgttttattctagtagtttcatagtttcaggtcttacatctaagtctttaatccattttgatttgtttttttttgtatagttagagataggggtctagtttcatttctctaaacagaccatcctttccctactgaatgttcttggcacctttgttgaaaattagctggttccaaatatgtgggtttatttctgggttctctcctctcttcccttggtctctttgtctgtttatgccagtaacatgctgtttggttactgtagctttgtagtatattttgacatcaggtagtgcgtgattagtgggtgatgcctccagctgtgttgtttttttttccccgccttgatacagggtcttactctgttacccaggctgtagtgcagtgatgtgatcacggctcactacagcctcagcctccctcaccacgccctgctaattttttgtagaggtggggttttgccatgttacacaggcaggcatcaaactcctggactccagtgatccacctgcctcagcctcccaaagtgctgggattacaggtgtgagccattatgcctggccttgctttgttctttttgctcaggattgctttggctattcagagtcttctgtgatttcataagaattttaggattgttttttctatttctgtgaagaatgtcttaggtattttgatatggattgtgttgaagctatagattgcttttggtattattaatatttttacaatattcttccaatctatgaacaagggatgtctccccccggcccacactcttttttttttttttttttaatttttcagtttccttcaccagtgttttacagtttcccttgtagagctctttcatatccttggttgaatttattcctaggtattttttttgtagctattgtaaatggaattactttcttgatttttttccactagtttgttattgggatgtagagatgctactaatttatttatttcttattttatttttattttttgagacagagtctcgctctgtcgcccaggctggagtgcagtggcgtgatctcggctcactgcaacctctgcctcccagattcaagcaattctcctgcctcagcctcccaagtagctgggattacaggtgcccaccaccacacccagctagtttttgtatttttagtagagacggggtttcaccatgttggccaggctgttctcgaagtcctgacctcaggtgatccacctgcctaggcctcccaaagtgctgggattgcaggtgtgagccaccatgcccggcctgtttatttatttttttgaaacaggttctcactcagtcacccaggctggagtgcagtggtgtgatctcggctcactgcaacctccacttctcaggctcaagtgatcctcctgcctcagcctcctgagtagatgggactacaggcacatggctagtaatttttgcatgttgcttttgtatcttgcaacttgactacatttttaaattcattttgagaatttttttggtggcagttttaggattttccacatatacaatcatgtcacttgcatatagggacaattcgacttcctccttttcaatttggatgccctttatgtctttttcttgcctgtttgctctggatagtacttctagtactatgttgaattagagtggtgagagacrgcatcctgtcttgttccaattttttgaggagaaattcagcttttccctgtttaaaatgatgttagctgtatttgtcctatatgacctttgttacattgaggtatgttccttctgtacctagtttgttgagggttttttttgttttgttttgttttgtttttctttgagatggagtctcgctctgtctcccaagctagagtgcagtggcgcaatcttggctcactgcaacctctgcctccctggttcaagcgattctcctgcctcagccttccgagtagctgggattacaggttcacgccaccacacctagctaatttttgtatttttagtagagacagggtatcaccatgttggccaggatagtctcgatctcttgacctcatgatccgccctcctcaaagcctcccaaagtgcttggattacaggcgagagccaccgcgcccagccgaggatttttttttaatcatgaagggatgttgaattttatcaaatgccttttctgtgtctattgagatgatcatacggttttgtccattctattcatgagatatatctcatatattaatttatgtatgttgaatcattcttgcatccctggaataaatcccacttgatcatggtgaattatcttttttatacattgttggatttggtttgctagtattttgttaagaatttttgcatctatgttcatgaggaatattgctatgtagttttcttttgttgttgtgtcctggtctggttttggcatcagggtaatcctggactcagaatgagtttggaagaattttctcctcttcacttttctaatgttttagaagaatttatattagttattgatataaatctggttgaattcagtagtgaagccgtattaggccattcttgcattgctatgaggaaatacctgagactgtataaattataaagaaaagaggtttaattggctcatggttctgcaggctgcacaggaagtgtggcaccaggcatctgcttggcttctgatgaggcttcagaaagcttacagtcatagcagaaggcaaagtggggactggtacatcacaatacaaaagtaggaagaagagtgactgggagtcgggggaaagtgggggaaaaaatgaccagatctaatgagaagtcacttaccatgaagacagcaccgccatgattcaaacacctcccaccaagccccacctccagcattggagattacaattccacatgaaatttgagcagggacaaatatttgaactatatcagaagccatcaggttctggcctttcctttgatggaataagttactgcttcagtcttatcactcataattagttcaggttgtgtttttcatggttcagttttggttggtggtatatgtccaggaatttatccatttccattaggtttttcagtttgttagcatatagttgttcatagtagtctctaatgattctttgtatttctgtggtatcagttgtaatgtctcctttttcgtttctgattttatttatttgagtcttctcatttttttcttggttagtctagctaatggtttgttggttttgtctatctttttttttaaaaaaacaactttttgtttcattgatcttttgcaacttttggtcttaattttgttgatttctgctctttattatttctctccttctactgaatttagacttgttttttttttcttttctagtttcttgatatgcatcattaggttgtttatttgaaatctctacttttttgatgtgtttattgctgtacaccatcttgatttctttattgacactatagttattcaggagcatgttgttgaatttccatgtatttatacagtttctaaagttcctcttgttattgatctctggttttatttccttatggtcagaaaagatayttgttataccatttattttaaattttttgaaatttgttttgaggcctaacacatggcctgtcctggataatattccatatgctgatgaaaagtatatactctgaagctgttggatgaaatgttttgtaaatgtctgttaggtctatttggtctaaagtgatgtttaaatccaatgggatgttgaagcccccaacaattatcgtactggaatctatctttcccattagatccaataatattttatctttctgagtgctctgacattgagcacacatatatttacaattggttatatcctattgctggattgttctctttaacattgtataattaccttctttgttgctttttacagctttgacttaagatcttttgatatatctactcctccttgcttttggtttccatttgtgtagaatatctttttccatcccttcatttttagtctgtatatatctttataggtgaagtgagtttcttgtaggcagtatatagttgggtcatcgttttttatcagttcatccagtctgcatcttgtaagtgggagaatataatcggtttatattcaaggctatttttcacaggtgaggaattactcctctcattttgttaatctttttctggttgctttatatattctttattcctctcttactgttaatcatcgcaacttggtggttttctgtagtgatacggtttgattctttttctttttctctttctcctttgtgtatctgctttatcagtgagttttatagatttacgtatttttatgatggtaattatcatcttttgacctccagatgcaggattctcttgagcatttcttgtaagtccagtctagtagtgacagattccttcagtttttgcttgtctgggaaagactttattgctctctcatttctgaaggatagctttgctatatgtagtatttttggctgagagttttttttttctttccattactttgcacatatcatttcattctctcctggcctgtaaggtttccactgagaaatctgctgttactcccttataattttcttgactcttttttcttgctgtttttagagtactctctttgtgtttgacttttcacaatttaggactgtaatataaagtggacctttttgggttaaatatatttgggaacctttgagctccctggacctggatgttcatatctctccttagacatgaaaaattttcagttgttatttcattaaataggttttctatgccttttttcatctcttcttctagaaatcatataatatgcatgtttgttcacttaatggtgtcccataagtcttgtaagctttcttcactctttttcattatttttgttttgttttgtttagtttgttgagacggagtcttactctgtcacccaggttggggtgcagtggcacaatcttagctcactgcagtctctgcctccggggttccagctattctcctgcctcagcctcccgcgtagctgggattacaggcatacaccactatgcctggctaatttttgtatgtttagtagagacaaggttttaccatgttagccaggctggtcttgaactcctgacctcaagtgatccacccgcctcagcctcccagagtgctaggattacaggcatgaaacattgctcccgccttattttgttttgttctgttaactgagtagtttcaaatgacctctcatcaagctcagagactttcttctgcttacgtctgctgttgaatttctgttgtactttttatttaattcattgaattcttcatctgtgggaaatctgtttggttcttttctatatctatctcttagttgaatttctagtttatatcatgaattatttgtctggttttgttgacttacttgtctgtattttctggtatctcattaagtttccttaagattattattttaggtcaggcatgggtgacttacacctgtaatcccatcacttttggaggccaaggcaagtggatcgatggagctcaggagtttgagatcagcctagggaacatagcaagaccccatctctatgaaaaagacaaaaataattagccaggtgtggtggtacgcacctatagtcccagctacttgtggggctgaggcaggaggattgcttgagcccaggaagttgaggttgcagtgagccatgtttgtgccactgcactccagcctgagtgacagagtgagatcctgtctcaaaacaaaaacaaaaacaaagaaaaaaaacatacaacaacaacaacaaaagatcattatttggagttccttttccagcagttttaaaatttcttttcattggggtctattactaaagagttatgcttctttggtggtgtcatattttcttgctttttcatgtttctgtaccactgtgttgatgtttgtgcatctaatggaactgttgactctcttaaactttctagagtggctttgatagacaaagactttcacctgcagttgggtcttagtgtgccggttgggaagagtgtgatgaatctgtgtgcaggtaggtttagtgatacagcctctgtgcaacttctttggctacattaaacatcaggaataaatgtggatgccttagtggcctagggtatagagttttttggtagtgatggcagaaggttgttaatatccttgttggaaaagacttttgggtcctcctgttctcattttccccacaatggggagactcttggtatctgacatagcctacaagcagccgtgagactaggatcctaggctcagggtcttgaggtacctttagcagcccagatccagggggttgggttccagctgtgaatctctatccctgggggggcatggcacagccctggcccaactccagggaaaaaatgggtgctctggaggtttgaattcagaatacacgccatagctgtaattcaggagcccaagtcagtagggctcagtctaataggcactttatgtggttgtttctttttttcccatttttgagcacaggaacttcagtaacttacctaaagtcacacagtaagcaaacctgcactaggaatgtgggttttttttcatatatatatatatatatatatatatttttttttttttttttttttttttaagggacagggtcttgctctgtcacccaggctggagtgtagtggcgtgatcatagcttactgcagcctcaaactcctgggctcaagagatcctctcacttcagcctcccaagtagagtagctgggaatacaggtgcacactaccatgcctggctaattttttattttttatagagatgggatcttgctttgttgcccaggctgcatgtttttgtacagattttttttatgtgcgtatatacctataaacccagcagattcctagagccatccacacattatcccttacctaattttaaaacagtggcagaagacagtcataaaagcttttaactggggcaaagattggaaatttcccccagtgaaagagcaagatttcctgtttcacatgatgccccctaattttgtgactcagaaggctgccttcgttacttccaaaaccttttatggccttgagttttttaggttttgaaatttttttcccacagtaaatcaatcattgatgttgaatgcatgtgccatgtatacaactgagaagcttagtgctcctgtattcaaactgtttcacccactgaaacctttgtggtgtgaataaagtaagtgttaatagaggttatcaggctttgcaatttcgaagtcgcttggagggaatggttttatatgccctcataaaagataagcagtgctggttggtaccacaaaagagctttgaatctaggcaactgtaaattaacaggagcatggttctgtttcaatagagcaattaactatagatctgaagaagtcataagaaagtgtaatattgataagacccttttataatgttgtgaacatccttaggagtacattataaataagctgagcaacacaggaaacagaatacaagaattcaagaatacaaacttctgaagatatactagaaaaaatgggaattttacttaaagaggactcttttaacacaggtagttgtgaacaaagaacatgcctgaacttagttgtcctctaggagtgcttagggaacttagaagaaaccttttgatcttcatttgggtagaaaatttacataacctgggaagaaaggatgaaatagtgaacctggtaaaagaaagtaaaatttggatcttttcttgccatgtataaatttttcaggtctctctgccagaggtattacctatactcctaaattcagggaaaagttattttgtcttcctgtttcatttgtacaaattttgaggatacctgtgcaattttgttatatacatagattgcatagtggtcaagtcagggtttgtagggtattcatcacccaaataacatacattgtgtacctaccaaccaatttctcatcttccttccccctcccactccctcaccattccaaatttctattctctataattccactctcaacattcatgtaaacctattttttagcacttatgaatgatatcatacagtatttgtctttctgtgcctggtttgttttaacttaggttccatacttgttgctgcaaatgacaggatctcacactttttgtggctaaatattactctattatgtatgtataccacattttctttattgattcatccattgatggacacttaggttaattccatatctttgctgttgtgcatagtcctgtgaaaaatacatgagtacagatatctttttgatatattgatttcttttcctttgagtagatacccagtactgggattgctagatccaatagtagttctatttttagttctttgggaaatctccatattgtcttccatagagactgtactaatttacattcccaccaacagtgtaaaagagttccctttctctgcatccttgctaacatctgttattttcttaatttaatagtagccgttctgactgcagtaagatgatatgccattgtggttttgatttgcatttctttaatgagtactaatgttgaacattttttaataacctcttggccatgtgtgtcttcttttgaaaaatgtctattaatgttcttttcccacttttaaattggattatttgcggtgggttttgttgtttgagttccttgtatattctggttattagtcccctgtcagatgaatagttgcagttattttctcccattcaacaggttatctcctctccctgttgattatttcttttgctgtgcaaaagtatgaatggatagccttgcaattacattttgaggactgaagatttagacattgtcatctccaattctagatagtgtgaataagtggagatagccatgaattgaagtgagaaaaagtttagctcaacttttcctcactattttcttttcttttcttttctttttttttttttttttttgagatggagtctcactctgtcgcccaggctggggtgtggtggcacaatctcagctcactgccatctctgcctcccaggttcaagcgattctcctgcctcagcctcccgagtagttgttattacaggcatgtgccaccacacccagctaattttgttgacgttacatatttccaggaccatgttagctgtttacctaacagttttctacctgttatgttccctatggatagagtctgtaccttatttatcttttttctctttcttcccttaaccgtctagtgtagtatcttgtacatagtaagtatttaagaaatgtttgaaatacagaaaataaatatatacaatacaaatgagttcagtgtttgaatctttctcagtcacctcggagttgcacaatcattgccaaatatgttctcattaacacagtccttaagttactatccactcaggagtttaacttctaccttgcggggaagataatccagaaccccctttcctttacccaaaaactttttgtgggtttttagacttttagactctttctgcttctgctatatttatacggaacagatttaagctacatatattttgttgatttataaagcccaatgaggtttttttcgttttcagtgtctttggaaatactgaggcatcactctggtttgccatgatttctcagacacccactttggggctgaaatttcattttactgatacatgtgttaaattgccatcaaacattttgtcatctcatgtttgggtgcttttccagttatctattgtgtgaaacaagccaataaaaaatgttggtttaagaggaggtagagcagctatatatgttcttagtcaacactgttttgattgcaaataacagcatctatttaaattagcttaaactcaaaaggaagatttactggaagaccagcaggatatgtcatgaaaccaagataggaaatatacaggcctatctagggattagaacaaaacacttggataattcctaggaaccaagacaactactcttggtccctggctttcttttcaactcttcttgtctctgacactttttttgaccctcctcctgcttagggctgtaaaatctcttgcctcagcttgcgtctaccagtatcattttgtctacattaccagccttctctgcttcttgtattttgtgggaaaaggcctcctgcatagcccttctcctcaatttaagccctagcagagattgagtagagcccttatgtcacaactgcacattcctaagaagaagattggctgacccatcttgggtcagcttttcaatcctggtccaggtagcttacttgtgggtacagaaccacatgggcccaccactcaagagagagcagattctctaagaatgaggtttaagagctgggagaaaaaaaatgacaatataacaaggaaatggagagcttacagaccatgcttttctttctcttctagtaacacttgctaaatagcaagccattttgccttgagacattttaacatcttgagattgttaaagtagggagtagaaactgagagctagtgtgtggtcctggcatagggcagtgagtacccccagaaacagaactacacctttcacaatgtattgtactcaccacctcttgtgggaaaataatcattttggagaaaaacctgctttgagcctctgttaagtgaggtagctcatctcatactttgagggggtctggaatgatgagttgaggtttaaagcaacatctgcctaacttttatgctctcaggacctgctcctgtgtgagtggcctatttgaaataagtaaatattagggcaacagcaacctaattttattttatattttattttttataatattttatatttattttaacagcctcatgttaaaaacaaaaagttgcaatcccgttcactgggtaaagggtgaggggggtgtttgaaaatatctgagcagcactaatgtcacagttgttcctcttagggagcagaacttaaatataaaagtgtgcctgatttggtgagttagtagcaagaacctgatcagtatatgaaaaccagctctatcttatggaacaaatgtcagatgaggaaaagtgtggtgtggtcatcttttcatttgagagaggaagcgggagggagagagagatttcaaatctacctgcattgtcaggaaacattttaaaaggatatttaaatgtttccattgatgttgtagcttaagtccagtgtgtggcaaatgcttaattttgtgaagaaaaaaataggaagagttgtttcatttattggacttggaaaggtataattcacatactcagtactaataatttctagtcttaaatggagcttaaatagtgatactatgaatttccatctcttcttccaagggtgaaatatcaggacctcagcctttagctatactagtttgcaaaaaacaaaaacaaaatcctgatatttctgaggcccgacttctggaccaggacgaattttccagttgtgtgtcctttgtaatttccgtaaagttttaggacatttctgatactgtggctaacagtgtaccctactgcgtgatgaaatataagcaagagatattcatatataatgctgtaagagacttgcttatcttttagggccagacctcctgtggtccttccctgcctctttaaattctcaaatagctctaaatcacctgagccacatagagtaattgcctttaattacatttataaaattttagagaattttgcactggggaaaggaaaatgtaaaaaaaagagagaaagagagagagagagaatctgtccttttccctcctgcaaaagaaaaacatttctattttacacattttggaccagtaatttccttaattgcaaatagactgttgtgagtttattataaaaattgtttggccttcatacatcccacagtaacacaaagtactgacaccttttcagcgcatcattttgcaaagtgcagaactgcttgaggttatttgctcagtgtgaaggtagaatttgctacttagattttgttttcttttaaagggcttcatgaaaaatagaaggtaaggttctagaaatacacccatgtaacttacatataagtgaactggactgaagagttgtgattagttataggaaatcaatatagtgcttatgcaggcagaggtttcaaaaaggtggatcaccaaaacctgtcagtgggagcttgcttggaaatagacacagaccctgaaggttctggtgctattttctccctttaattctatgtcatattttgacctttttttggtctttactcgtatttctcttactgtatacctgtatgtttctcttccatccgtattctcacagccatttytctggcattgagtagagcttttagtggctgccgttagagaatgcttgtttaaggaggtcaaagacaagggaagtctcagtctaaaataaggactagaagtaagctcagtgaccctcaaaggactgaccacagcccttagtcactcttcttcctagctcatagtatgtcaaggttaatcatttagaagggaggtaacatttagcattcccaaagctgtggagtactatggaatgaagaaggtgagtcattgaagagaattattcctatgattatgagaaggcagaattatgtatctactgtattatattaaaacttaactagttcctttccagtatctgtcagtgtcattggtaagaaaacatttccttaagttccagtaacaaactatttaaagatagataactccttgtgcctactatcataatagtaatctagctgctagctaagcccttttctatttgagaatataagttatttgtaagtgtgcttggaacaaaaaccaataaaaagatcaatttttaacatttgtgacaattatattgtcattttctttctacaaaagtaatttatattccatccattaaaagaagagtttgtcagatctgcacgattctgcattcttgtgctttcagcagtctaacacacttttaacatttttctgcattttcttttctttatacttcatattgccttaaagccagcctgtaggtaatctcttctacattagtgataatgcaaggagatgaagttttcactaacaaaacactacacatcactgtgtttatagctaccactatgctgggtaatttgagggccaaagaattataaataagatgatctctgcccttcagtacactagagtgtcattggaaggaaaatgtaatatttactgagcttacagtatgttcatgttaggacagtgaggttaatggtaggacaataatggtaagtaactgtaacacaagctaaaacagtagaatgttatatatatttttaaaatgcatataaaatgaggaagttctgaaagaaaaaatggtttctaattttgagaaagagaaaaggttttatagagagagtggcatgtatggggctgagctttaaaaaacgactatgatttatttgaacatataaaaatggaagagtaaggaaagctttccaagtacaaaaaataaaccaagtcccagaggctgctatgtctctgttcatgcatttattaaagagatattcttgagcatcccacttgggttaagtactattctaagctaagtcttagggatacagtagtgaacaagataggcacagcacctaatatatatatgtatatgtgtgtgtgtatatatatatatatcctaatatatatatacatatacatatatgagcaagacctcatctccaaatatatatatgtttatataaatataaaatataaatatatatataatatatatatatttggagatgaggttttgctctgtcacctaggctgaagtgcagtggtgtcatcacagctcactgcagcctcaacctcctgggctcaagagattctcctaccccagcttcctgagtagctgggaccacaggcatacatcacacgctcaactaatttttttattttttgtaaacatggggtctccctatgttgcccaggctagtctcgaacttttggcctcaagcaatcctcctgcctcagcctcccaaagtgctgagattacaggtgtgagccaccatgcccaggcttaattaatgttctaaaaggaatataacctgcaattttattttattttattatttatttatttatttttttgagacggattctcgctctgtcacccaggctggagtgcagtggcacaatctcggctcactgcaacctctgcctcctgggttcatgccattctcctgcctcagcctcctgagtagttgggactacagtcacccaccaccacgcctggctaatttttttgtattttttagtagagacggggtttcaccgtgttagccaggatggtctcaatcttctgacctagtgatccacccaccttggcctcccaaagtggtgggattacaggcgtgagccactgcacccggctgccattttatttttaaataccctcacagacctgagtactcaagtaatggggactgtcgtgctaaatgttgaaaataggcccaagcctagagtcagaatagggaccaaagaagatttagaactctggcagtttgggaaggatgaggtgggagaactgctcgagcccaggacttcaggaccaacctgggcaacctagtgggaccctgtctcaacaaaaaattaaaaattagccaggcgtggtgtcacacgtctgtaagtcccagccactcgggaggctgaggtgggaatattgcttgagcctgggaagtcaaggctgcagtgagccatggtttgtgccactgcactatagcctgggtgatagagtgagaccctgacttaaaaaaaaaaaaccaaaactggcaatttggcactatatactaaaatattaactatgcaagcatttgactcagcatttcctgtttaaggaattaacattcaagatatgtttaccgggcagggcatggtggctcacgcctataatccaagcactttgggaggcccagcgcgtcaggtgatctgcctggccaacatggtaaaaccctgtctctactaaaaatataaaaattagccgggcacggtggcgcatgcttgtaatcccagctactccagaggctgagacaggagaatcccttgaacccgggaggtggaagttacagtgagccgaggtcgcgccactgccctccagcctgggcgacagagtgagattctgtyttaaaaaaaaaaaaaaaaaaaaaaaaaaaaaaaaaaaaaaaatttacaaacatgcccaaaaatataggcttaaggatttttttttgtagtattgcatgcctatttgtctagatgcttttatttgccaagagtagaatcccagttcaagctcacttgagagagggagaggagaatttcttggctcacagaactgagaagtcaaaagcattctcacttcaagccatccagatacaggactaataatgtccttggtccataggtatgtgatacatttgcctctctttttttctcacctcttctttctctgcattagcttcattctcaaataggctttctccatgtggtggtccctggcaactccaggctgagctgctttcagtttagcgatcagggagagagagagagagagagagagaaagagagagagaaagagagagaatactcctccttctctatagttccacaaaagtcctagagttgactcttgttacatgagagacatggcacccattcctgagccagttttcccaggcaggcagatagagtattctgagtaattgggcttgtggcatcctcgggatgtcagtgggagatgggttgcccccactttaaccacatgaagtaacactggggaaatggtactttccactgtaagaataaggtggtgttatcagaaggaacaaaaggatgcagaccaggcaaaagcaataggtgttcactataatatatatttctaattaacacatggaaacagcatgaatgcccatcagtagggggaaagttaaacagatatgttacatggtggaatactattatactactattaatatgtagctattaaaatgaataaggtaggtctatatgttgataagaaaaaatatccactctgtagtatttttctttttcttttttttttttttttttttgagacagagtctcactctgtcgcccaggctggtgtacagcggtatgatctcagcttactgccaactgctgcctctgaagctcaagtgatcctcttgtctcagcctcccaagtagctgggaccacaaacacacaccaccacacctggctaattttttgtagttgtggtagagacaggggtttcaccatgttgcccaggctggtgttgaacttctgagcacaagcaatccacctgccttggcctcccagactgttcggattatgggcgtgagccaccatgtctggcccatgctatagtattaaattaaaaatgaagttgcagtacactgttcttaatcatgtgcctttgtggttgtgaatactttttctttttcttttctttttttgagacggagtcttgctgtgttgccaggctggagtacagtggcatgatcttggctcactgcaacctccgcctctggggttcaagtgattcccctgcctcagcctccccagtagctgggaatacaggcgtgcgccaccacgcccagctaattctttgtattttagtgagacggggtttcaccaggatggtctggagctcctgacctcgtgatccacctgcctcggcctctcacagtgctgggattacaggcgtgagccaccgtgcccgggtgtgaataccttttctttatatgctttttactgcttttggtttgctgttatgtttggttgtctaaaaatgggtaatatagatatccatgctatatctgtctgtttatcacttttataatttaaaaaagtaatgccccaggtggttcctgttcaagaccagggactggaattgacaaggcttgagaaccacagagaggtggacaggaaaggtgaaaagatagtgtttgtggagctgattttaaaataatgggggagagggcaagaaaatttcttaaaaattaaaaataagggaagccaaaagggtgagtaggacaaatcaagctgcctgtggagcatagtgggggatttatgtactggaaaggtgataaagaattggtggaaaaagaaaatgttaaccaaaagggcaggacatagggtttggaagagttgggttggggagcatggagaataattttggcaacaacacagatgaaaaagaacattgagagtaagagaatgtaggcagcttagtgtagagaagagaacagtgaatctggaattgagagatttggttgtattatttgggaacctaggagatttcacacaatatttctcagggtttttatttcatctgtaaaatggggtctttagtacttcccctgtttttccttacaggatgaccatgagattcaagtgtggtaggaaaagactacttaggtgaagaaaagaccgtgtatttccaagttaaatgggaccaaaataaagaatttgtttataaattgagagggagaagataagggtaggaagaagttactggacttcctttcatattagatgatttagatgtctcatttttttggtcatttaatctgtttggatgggcaggtgctgttttgagagaggagaagacatttgtttgtgtgtagttttcagtgctgttaactgaaataagtaattctgcatagttgtttacctacatatgggaacagcaagataaactgtagatatcatttacaatcatcatggaagatttaaaatacacagaagtcaatgtagaaatattgcaactctgaatttacttggagtattcatacttgtggcttgcccagcagaactgtcttttaaaagtattcccatgaaatgtaagcaagaactcagaaaaatcaattgtgttagtattcgtgcacattttaaatccactgaatttgctttgctctgtatgtattgtgtgtatttcagcattttgaggaaagcattaggcattccaaatggaaaactcaagtgccatcgcactgagttgtagttattaatttacttagtacttattttaaccatatctaccatatgcttggaccagtgctaggtgctgacatacaaaaaattaacacacagtagttgctgtcttcaaatagccttctgttagtagggaagacagacacatggataaagaaagtgtaatgggactggggcacgattgtcaggaaggggatcactgtactttgggtaacctcattttttccttttcattccttctagctgcttgctagaaccttcttgactttttagttgttaattgttcaggtggattttaagaagaatcaggtgtattttcttaggttttgaggcagattttgaaattcagtagataatccatctttttatcttaaatcacaggaactacagtactaaggaaggtggaaaaatgtcaaatactggattttttaatctcatgaatttaccatctgagtaaagttagtctgttagtaactgagctgagctgagttagtctccttttttttttttggtttgtttgtttgtttgtttgtttgttttgagacggaatcttgctctgtcactgggctggagtacagtgttgcgatcttggctcactgcagcctccacctcttgggttcaagcgattcccctgcctcagcctccctagtctgggactacaggcgtgcaccaccacgcccagctaattttttgtattttagtagagacggggtttctccatgttgaccaagatggtcttgatctcctgacctcgtgatccatacaccttggcctcccaaagtgctgggattacaggcgtgagccaccacacccagccgagktagtctttttggaaagggaaaggactttactcctctgcccctacccacctccaatacacaacacacttttacctgtttttattttgggccaggcacagtggcttacgtgcccagcactttgggtggccaaggtgttaccagatggaaagtcttgactgtgagttgtccaagttcttggtgccttgagcaaagaattgaacaaaaygcacaaagcaatggaagacgaaggcatagatttgttgaagtgaaagtacactccacagagtgggagcgggcttgagcgggtggctcaagagccctgattgtaatgttccttggggtttttattgaattaaaagaatatggtaagccgggagcagtgtctcacgcctgtaatcccagcacttcgggaggccgaggcaggtggatcacctgaggtcaggagttcaagatcagcctggccaacatagcgaaaccccgactctactaaaaatataaaaatcagctggatgtggtgacaggcacccgtaatcccagttacttgggaggctgaggcaggagaatcagttgaacttgggaggcagaggttgcagtgagccgagatcacgccattgcactccagcctgggcgacacgagtgaaactctgttcaacaacaacaacaaaagatcatggtaacacatctaagtacctttaggggcttctgataggttatgccctatgtaaatgaaggattctgccctaggccaatcagaggcaggattctgtccaggaccagtcagaatcaagattctgcccaggaccaatcagaggcatctcacctatggcatatatgcagatgaaggtcccagaatggaccaaaaccagacattcccattcctgacataggggaggggaggttcggagagggatgggcctttggcctgttatgacttggttgtggacaggtggggttttcctcttagtccaattccaagaaggcagccataggttggccttaggtttactgtttccagaccctattctcctgcctcagaggcaggtggaccacttgaggccaggagtttgagaccagcctggctaacatggtgaaaccccagctctactaaaaatgcaaaaattagccaggcatggtggtgcatgcctgtaatcccagccactcgggtggctgaggcaagataatcgcttgaacccaggaggtagaggttgcagtgacccaaaattgcaccactgtactccagcctgggcaacagagcaagactctgtctccaaaaaaaaaaaaaaaaaaagaaaagtgtattttggattctatctactatagaagaaatctgtcctctgtcctgtcttgggctttcttttctgactccttttgggtaaataaaatgttaagcctgctttaaggctcaaggcattcataattatgtgtatgtaatagagacactgttaaagctcaatgtctgtggctcggaaatgtgaaattattcctcttcttttgcctttcctcactgcctcttcccccaccatacaaatttgagctcgtgttagcagcctatgtttggcagtattccagttcccaggaggcctttaaacaagatgattgtaaaacatttttcattacaggacagacaaagtaatcctgttttcttaattctgggcctagctgtttttgttattaaaccagcattttgagtaaattcatatgtttaactggttcatgttgcaaagagacatttttcagagtcagagacatgagagggattgtttgttcttttttaaaaaagatatactacgtattatctcatatctttgtaataatgcattgtttcatgggtttattctcagagttttaaaggctatgcttccatttttccctttcgttacttacaatggaataacatctcatttatctgcctatttctgatttcttgctaagggtacatgtttaatattattttctttaatgataattgcccatgtattataataataattgcctgatccctcagaaacrttacagagcatttagtagttgtgctagaaactattactattgatggggctgagaagagaattaatttaatttgggagaaaaattattctattttctttaaacattaaaaaataaactatataaacaaagcaaaagaatgggcttgccaaggttgttgtccttcatagttaggtaatttagtttttaaaaaagaatgaaagactaattattaggcaataataggatcaaattaccaaaacytttgaggtggttctatttcagttctcaacctgatgtgcattttaaaatatctctacttagagtagttagggttcataatgtgttgtagattgtttttagataacagcttggatgataaaagaagccattttccttgaattggtgtatttgactcaagttaaacttcatacagactgaaaattagctctagtgttctacattcattgcctattctgtgcagcttgatgtacgtgtgagccatatgtctggcagggtttataacatcatgttattgatgatggaaaggctctttcatagtactaagaaaaatatacaagataacatatgtactgtatatgtaaccttgcagtttggtttataagagatttaacctgtagttaaaggaaatataatgaaatctattggaaatccttcagaaaagtaaaattcagtagtcacttctttagtttccaggtttctatgcagtttaccaatttaggaaggggagacctcattagcacattatttccagagcagatgagagattataaaactattaataccttagtttccaatataccattgatcaaagaatccagcacatatcttccytgcctgagtctcccacttcctttccattccctcataattatttatagaaagtacctgtttaccgcatgtgtaccttatgttgcacttaaggatctgcccttctccccagcctcattaaaggatttcatagcataatgttgattaatttaaaatttcttaagcagtggattagagatggctctgcaaaagaagaatgaaatatacaggattttttttttcatttaaatgcagcccagctgataagccgttactgtgtggtaatctctgaccaaagagacagactttcttagtgtgcttgtgtttgtgtcttttaccaccagcacagaccactttatgggcactcctgcgaaaaaccaggctcagagtagaacttgcatggggagctttctgtacagatagttctaataaattacagctacatctcccaaagaaacttttatgctcaaaggtatattttctgtaagaaaataactaagaaactttaaacagagaaatctttttaacttgccttaaaattctttccttcaaaaggtattgagtccagttgttttgatctgaaataacttctgaaagagacctgtcactgtattctgaatccttatattaatcataaaacaaagcaaaaccctttatttctactctctagatatagtgtttttcagctgaggttacacatcagaatcacttgtggagcaatgtttgcttccactcctagaaattctgactcagtaggtaggaggtgaagtcactgcatctcattttgggtttttttttttttttaagttttaaagatatttctgatagatacacttccagttgagtttcactaccagcttatatttgaattggtgccacacgttatttcataaaatatggaggtgagtttcattcatagttctgtggctttacaaagaggaacccagaaggtagctagaaggaaatcctggccataagaatttggattttgaaaggaaccagtctaaaccccctcctcttttttttttttttttttttttgttgttgttgttgttgttatttctttatttcttctaaggagaaaaaaaacgggatacatgtgcagaatgtgcaggtttgttacgtaggtacatgtgtgccatggtggtgtgctacacctattgacccgtcttctaagttccctcccccgaccccccatccaccaacaggccctggtgtgtgttgttcccctctctgtgtccatgtgttctcaatgttcaactcccacttatgagtgagaacatgtggtgtttggttttctgttcctgtgttagtttgctgaggatgatggcttccagcttcattcatgtccctgcaaaggacatgatcttgttcctttttatggctgcatagtattccatggtgtgtatgtaccatattttctttatccagtctatcattgatgggcatttgggttggttccatgtctttgctattgtaaatagtgctgcagtaaacatacatgtgcatgtgtctttatagtagaatgatttatattcctttgggtatatactcagtaatgggattgctgggtcaagtggtatttctggttctatatccttaaggaatcaccatactgtcttccacaatggttgaactaatttacattcctaccaacagtgtaaaagtgttcctatttctccatagcctctccagcatctgttgtttcctgactttttaataatcaccattctgactggcgtgagatggtatctcattgtgtaaaccccctcctctttacagatgaataagctaacccagagaggctaaggaatgtgccagagttgaaagcagaagcaaatactagatctaagactctgacttgagctttttctacactggtatctcggaccttgaccctctcctagaaatgcttcaaaaccactcagtggtctagaagttgctttgagcatcccaaagcctgccagtgtgttgtgaggtctcagggtacttaataaaaccaataatgcagcgagcaggaactcttaattcttccaagttcctaggtaggagtaatgggtgacattatagttagaaattgtagatattactcaaaatccttttgtgacttcattgtaaacatggaaacttctggcaaaagataatctagatttgatactaaggattattaagaacaagatcagttgtctcatttaaactgaaccttaagtattggcaacaagtgtaggaaattatgccaatattatatttctaagcaagcctgacttttagcttgtactttagaaagaggatattatgcccagatttgcaatttaaccaacgaatggagtaatatgtttattaattaggattagagttggctgctttttaaaaatccaaatacaagtagctcagtcaaggtggagattgatttttctttttgataaaaaaaatccagagagaagaaaagtccaacattagcatggttactccacagccatcagggacttaggttctgttttttgctccatctattcttggcactactttacatcgtcaagatgtctggtgattctagatggcttctggacctttcattctagccatctctcttgaaagaatttttttagaattatacactcagtggccaggcacggaggctcatgcctgtaatcccagcactttgggaggccaaggcaggcagatcacttgaggccaggagtttgagaccagcctggccaacatggtgaaatctcatctctaccaaaaacaaacaaaaaaaaaattagccatagtctgtagtcccagctactcaggaggctgaggcaagagtaaaactaaaaacaaaattagctgagtctgtagtcccagctactcaggaggctgaggcaagagaaaagcttgaacccaggaggcggaggttgcactgatctaagatcatgcaactgcactccagcctgggcagcagagcaagactctgaataaaaaaaaaaaaaagagttatacactcatttctgcttccatctcattggtctttcctaattgtcaagggagactggagttataactgggcaagttgctatttgcaacaattagaagttctgggccaggcatggtggctcatgcctataataccagcactttgggaggctgagttgggtggatcacttgaggtcaggagttcaagaccagcctgaccagcaagatgaagcttcgtctttactaaaaatacaaaaattatccaggcatggtggcaggtgcctgtaatctcagctactcaggaggctgaggcaggacaatggcttgaacccaagaggcggaggttgcagtgagctgagaccacgccactgcattccggcctgagcaacagagcaagactctgtctcaaaaaaaaaaaaaaaagttatgttattttaaaagaaggggaggctgggcgtggtggctcacacctgtaatgccagcactttgagaggccaaggcaggcagatcacgaggtcaggagatcgagactatcctggccaacatggcgaaatcccatctctactaaaaatttaaaaattagctaggtgtggtggtacgtgcctgtaatcccagctacttgggaggccgaggcacgagaatcacttgaactcaggaggtggaggttgcattgagctgagatcgtgccactgcactccagcctggcaacagagcgagactctgtctcaaaaaaaaaaaaaaagaaaagaaaagaaaaagaaaaaaagaaggggagaggcatccctgtaatcttagcacttgggaggtcaaagcaggaggatcagttgagcccagaaattcaagaccagcctggacaacatagtgggagctcatctctggaaaaaatttaagaaactagcccgatgtggtgtcatgtgcctgtgctcccagctgtttgggaggctgaggcaggaggattgcttggtcccaggaggtcgaggctgcagtgagccatggtcataccactgccctccagcctgggtgacacagtgagacactgtctcaaaagaaaaaaggagagggagaatggatattgggcatgcaaacaacaggcgctgccacaacctgctttgaagaatataatatttatattaggaaaataacattttagtggcattaaatccttatataggacataaatttaaaagatccccaaactgcatttaccatgtgtctgattaataaaagcagtaaatctctaggacagagtgttctgctttggatgtctcagcaggagtcattggaaacaactagttgggttttatatatttttaaaaagctgaaaaatgacttcttcaaaacaaccgggaaaaaaagactctttggggcctggtgtggtggctcacgcctgtaatcccagcacttcgggaggctgaggcgggcggatcacctgaggtcaggagtttgaggccagcctggccaacatgggggaacgctgtctctactaaaaatacaaaaattagctgggcgtggtggtgtgcacctgtaatcccagctactcaggaggctgaggcaggagaatggcttgaactcgggaggcggaggttgcagtgagtcgagatggcgccagtgcactccagcctgggctacagagtgaaactccatgtaaaaaaaaaaaaaaaaaaaacacttcaaattaaatccttttctcttttggagatagggagaatcaagacaacaacaaaaacaattgaacagatatttattgaactagcaggagtaacatatgttagaggatacaagctaggaataaacatatttaaagaaaatgttcaagttgtttaggatttaggccgggcatggtagctctcgcctgtaatcccagcattttgggaggctgaggtggatggatcacttgaagtcgggagttcgagagcagcctggccaacatggcaaaaccctgtctctccaaaaaatgcaaaaaaaaattggtggacaccatgcctgtaatctcagctacttgggaggctgaggcgcaagaattgcttgaacccaggaggcggaggttacagtgggccaagattgcgccactatactccagcctgggtgacagaatgagactctgtctaaaaaaaaaaaaaagttgtttaggatttaatgaatcaagatagactaatacaatatatgaaatagttattaattccaaatatgtgagacctaccctcgagagaagtatgtgttagatgtacatctgtctatatcccacccatagaaataaaaagggaatggggctggacacagtagctcatgcctgtattcccagcactttgggaggccaaggagggaggattgcttgagcttgggagttgttcaggaccagcctgagtaacatagtgagaccccatctctataaaaaatcaaaaatttagtctggtgtggtagagcgagcctacagtcccagctgctacttgggaggctgagctgggaagatcgcgttagtccgggaggcagagattgcgagccgagatcttaccactgcactccagcctgggtaacactgagaccttgtctcaagttaaaacacttagaggcagaagcaaacaataatctacaacatatgcaactgtagaccactatatacataaatatataagatgggaatgtttctgctctgtgaaaccagataattttttaagtgttctataatcttttttttttttttttgagatggagtctcgctctgtcacccaggctggagtgcagtggcgccatctcagctcactgcaacctccgcctcctgagttcaaacgattctcctgtctcagcctcctgagtagctgggactataggtgcgtgccaccatgcccagctaatttttgtattttcagtagagacagtttcaccatgttggccaggctggtctcaaactcttgaccttgtgatccactcacctcagcctcccaaagtgctggacttacaggcatgagccactgcgcctggcgtctgtaatcctatttaatatctactattctcatggtaccagttatatatttagtgaatgcctcatatttacaatgcactttataaaggaaattcattcacaatttgccacttaggtgagaaagtctggattttggcttcttaatagttatgaatttcaaatctggggaaaacccagccttgtgttttttcccccttttcctttcatcagcacttatcagcaaccaaacactaagtgtctgttgacttttctccagctgataaaaaacaaaaaactatagagactccctgtgaaaagagggccagttgtgctggcctggggccaggctgcacgctctgtgaccttgcctcttcagtctgagttgtccatagggcaacagttccaaatagcccatgtggctatggcagtaagcatagagagtgctcatgaaccagataatgtaacaagttatgttagcctggcctttgagctcagtgagccatcctttgagccttttatgatactgcactttcaggcatccttttgggaagatccaatggatcagggaccattctctatcttatagcagtggaaatgtttttggcactgtggtattaaataactactcatttgaacgtattgtgcaatgacttagcctttcccatcattattagttcccattgaagctgttgtgctcagtttgagtttccagtagggactatgaaagaaaatggaaatctcacaaattgtacttttaaaaatattttattcagtgctaatactgttatctcatattttggcttttgtgtctcccactgtatacccccatttcccctctgctttcaggtgaaggtctcccacaggtgtattactttggaccatgtgggaaatataatgccatggtgctggagctccttggccctagcttggaggacttgtttgacctctgtgaccgaacatttactttgaagacggtgttaatgatagccatccagytggtaagttggaattgctcttctagaagagaataagctggttcctcagccacatccttgtgggccttttggtgatttactagccgtagcaacacatcaagaattagtactcacagkcttgatggcattctgggaagctggctggggcaaaaagggtaaattcagagaagtcacactacatctgcaatttgctctattttaagactttgcaccttggagcaatgctctgcccttaactgaagaggaagtatataatttagattagggagaaagaggtcgattagatggagttgtaaaaatgtgaataatttatttgattttgttttgttttgtttttcatttttgagacagggtctctgtcacccaggctagagtacagtagcatgatcatagctcagtgcaacctcaaactcctaggctcaagtgattctcctgcctcagcctctccagcagctaggactgcaggtgccatgccagctcatttaaaaaaaaaaaagtgttttggagacagactcccactatgttgcccaggcttgtctaaactggtctcaagcagtcctcccacctcggcctcccaatgtgctaggattacaggcatgaaccactgcacccagcctatttatgtgttttaaatatagctgtaaggttttgtcatgtcctatctctcccttcactgttgcaaccaagaaaagattgatgttataacccattgcactaacactcagattcaaaattgtgtgactaggaatttgctgtagttctcaggcctccagttctctcagagacaaatttcagctgaagaggcagctcttgtagctcctaccaaattatacacaaataccagtttaagaagcagttccaacagttcctttgagaagtttgtcacaagccctttggggaaggatgcaaatatatcttcatttgtttaaaatggtaatggtctctcccactgtcctataaaaatttggaaatgttagataattgactttgacttttgagccccaaattcaaatatctgagcttctctttctctactaaaagttagtagaaaagggctgggaatggtggctcacgcctgtaatcccagcactttgggaggccaaggtgggcggatcatgaggtcaggagatcgagaccatcctggctaacgcagtgaaaccccatctctactaaaaatacaaaaaattagctgggcgtggtggcgagcgcctttagtcccagctactcaggaggctgaggcaggagaatggcgtgaacccaggaggtggagcttgcagtgagccgagatcgtgccactgcactccagcctgggcgacagagcaagactccatctcaaaaaaaaaaaaaaaaaaaaaaaaagttagtagaaaagcttagtagatagaaatacttaataaaatttgaaatgcttttatgattattatttttggttatatttaacttaacataaaaactatagccctggccaggcatggtggctcgtgtctataatcccagcactttgtgaggctgaggtgggagggtcacttgaggccaggagtttgagaccagcgtaggcaacatagaccccatctctacaaaaataatctgaaaataaatttaaaacaacaacgatgaactgtttcggccaggcatggtggctcatgcctgtaatcctagcattttgggaggccgaggaggacggatcacccaaggtcaggagtttgagaccagtgtggccaacatggtgaaaccctgtctctactaaaaatacaaaaattagccaggcatggtggcatgtgcatgtaatcccagctacccgggaggctgaggcacgagaattgctagaacccaggaggctgaggctgcactccaccctgggtgacagagcaagactccgtctcaaaaataataataataataatgaactgtttccctgtctctgctgctaattagctatgtgatgtcaggccagtattaacttctctgggcctcacaacatcgaaaactgggttgggtagtcttgtccaaataagcataagaagatgtgggcagaaggtgaatgtagcagtggcatttgtctcaaaggtcaccaacagtttgatatcctacctgggaatacttcttttgtctcaaatgcttaattttctgacgtagcatataaacaactgatttcatttgtcatttgcaaattgtgacattatgaggtaaaattgagctatcattttagcagacctgtactatcccactttttttcctagtcttgatatttgttgtgtacgtatttatagcaaaatatttttttgtttacaagtcagtgaagtgactcagggcggtgaaaggagatgaattttactgttatttcaataattaaaaccttggtctggctaaagaaactgttttgatgtattttcctgatatacttctttacagtctttctatcatttgtttctctttcagctttctcgaatggaatacgtgcactcaaagaacctcatttaccgagatgtcaagccagagaacttcctgattggtcgacaaggcaataagaaagagcatgttatacacattatagactttggactggccaaggaatacattgaccccgaaaccaaaaaacacataccttatagggaacacaaaagtttaactggaactgcaagatatatgtctatcaacacgcatcttggcaaaggtgtgtttttttctgttccatgaaaggggcgagtcattagaacagtttattatttctgtaacattatatccccattgtgcattacaacttgtggtttttattgtttcacaaggttgagtgatttttatacatgagaagttgagatggtaagttaatgacttttcaaagaatcctatagactatgcataggttcttaattctttacactgtttccaaatgtttagtttctgagcagtgtgagtacttgaattattgtaaaaagaggatagcattttaatgagtttagtaatgaatttggtatttacttatgtatgaccctatatatgatagtcctgaagaggacatcaggctgggtcagcggtggggaagagtgcctcactaaaaatggagtagacttctgttcactgcacatagttctgcacagaagtcttcaaggaagagcttctgtcttattcagtgaaaatatacttggtttaccattagtcttgcaatttactcaggataaacaacctgcacaaatattgttaaatgctctaatcaaggcagaagaccttacctgtgaggaactagcccaagggggagagtatttgtcagagaagcctaaggaacagtggggagaccaagcaggcagagccctaggcttatccacttcaaaaaagcctcccttttttatgtttcatatattgggcttccatggaagattctatttgaagaaaagactcctaggtgattgaaaaaaacatgtttgaaaatcaacattctagagagtagacaagcagaatattctcagattccatactcctaggcagaaataattataaaatattcttaaatattagtgaactattgcacactaagatgtattttattttatttatttttttgagatgtagtctcgctctatcacccaggctggagtgcagtggcacgatttcggctcactgcaacctctgcctcgcgggttcaagcaattctcctgcctcagcctcccgagtagctgggattacaggcatgcatcaccacacctggctaatttttgtccttttaatagagacgggatttcaccatgttggccaggctggtcttgaactcctggccttaagtgatctgcctgcctcggcctcccaaagtgctgggattacaggtgtgagccaccgtgcccagcatatttattttatttttagagacagaatctcactctcactcaggctggagtgcagcagtgtgatcatagctcactataacctcagtcacctgagctggagagatctttctcagcctcagtagctagggttacaggcgcatgccatcatgcccagctaacttctaaatttttttatagagatagagtctcactgtgttccccaggcgggtctcaaactcctggtttcaagagatcctgttgcctcagcctcccaacacactgggattatagatgtgagccaccatgcctggcctgcacattaataagtattttaaagactaatgtaatatctactaagttccctcattgagtaaactacacaggttattcacctgaggaattcaagtgatagtgaagagtaaaaaatggcattacaaagtagtatgatacaattcgatttgaaattatgatgttatcaagattttttcagtaaccacatggaaatcctcacttaagtaaatgtaatactttaaaattagactagaggtcctctggtacttactatcagcgttactttggacaagttacttaatctcactgaaactcctctgtaaaatgagggtaatgcttcacagggatattttgagggttgaatggataatatatgtgaaagcaccatgtctgacataggtctcttgcatagtgctcagcatccccttcttccttcacaatgacaagtaattttccattttacaaggaaacaaaaactgtatcttaaataataaacttaagattatgtggtttaactgacaaactctagaagttgttttaatgcccacttcctgggctcagccatttgtgtactaattttattgttcttaagaggaaagacaagaacagacaagggatgggtgttcatgttatgtttgtataagatacagagtagtggttaagaaaaaggatgcaaatcctggcgctctttcttaatagctatgtaattttgatccaataaccttcttccctcagcctcggttatctcatgtataaaatgggtatgataattatgcctgtaatatatggttctatgagataatgtatgtaaaatgtttagcataatgcctgataatagtaatatcagtccatattgtaattatcccgattattatttattcaacaaaatctgttttaagcatctactgtgcatcagtctgtttcatctcttggtgtactgccattcctgccgggacttttgagtttacccccagacttggcttactgagtaccagagtttttcaggtcaaatctaacctgtcatcatattttgtgctctctgcattacagagaatacataaagaaagttgtcactgctttttaaactctttcccatgcctcaaacgatagaagtttttgtaggaactctaatgctattggtttttaaatgtgttgcatttttttgtgttgcaaagaagaaatgactgagatgtgtattttcaaatggctttgagaaaatcacttcttaattttacagaggaggaggacaagagaagaagcctcctaaaccttgcattagttgccacatcagagtagccacacttacttagtccattttgtgttgctataaaggaatacctgaggctgggtcattttataaagaaaagacctttaaatttggctcagggttctgcaggctgtacaagaagcatggcactggcatctgcatctggtgagggcctcaggggcctcatgctgcttccactcatggtgtaaggggaaggggagcagccagcatgtgcagatcacatgggaaggggggtgctaggctcttctcaccaacctgctttcttgggaactcatccctaagggaggtcgttaatcagttaatgagggatatacccccatgacccaaacaccttccatttggcccagcttcgaacattgggatcaaatttcaacgtgaggtttgtgtgtgttggggggtccgggggaaggacagaaatccagaccatagtagccaccttcccactgattaagcttttactgagaagcccaatttatattatttaatggttgaaattagggtgagaacactgggttaccttgctccctgccttcaacaaatatatttaacctaaaatcagggatgttatgcatgtaaaccaagcacatctttctgattggatgaaagcacacctttcaaccaatcagaagaattgaagaattttgtgtcctgctggtctcactggtattggaaacctttcttctttgaaaatgaaaatatgctgcatgaaaaaatgagggcatgtagaaataatgaattggacaagtgtggagtgttcaaagtcgtatgaaaataaagcatgctctggttttcactcttatttttttcctgaaaggccctaaaggcttaagttatcagattattttagaattttagagctggaaaatgacttttcaaattctccccagattgaacactttattttcagatgaggaaactgagacccaaagtaggtgacttgaccatgcttaatttcactggattaaattagtggaaaggataaaccaagatctagatacctaaatcgttgagctgatttaggtacccttattttgggtaccttatttaggtacccttcctgatttaggaacccttatttttcctattgtcccatattctatagttctttttcatagttctcaggatttgaaaagttactttattacttattccagtgagttttaaaaatatattaatctcataatttattttgctgtgaaatcttttttctgtaggcctgatcaatattgaaaatgtggagagttttcgccctctagtgctcaactgtttaaaattcaaacatttgtccagtgaatttttaataaccaaggggcttcttgttacaggaagtggatataaaaatggagaggcaatgagtaggtgtgatacagtatgagaaactgcagagtcgtttctctatctgccctgctttgtgggaggcctccactcaactctccttgttcttttctctttttcatttgtgcatccttaggttgtgtcaacaaactgtttttgtataactgctttttttttcaattatgaatattttattgcaaacttcagacaagccatgtagacaaaggattctgatggtcatgctgttttcattctttttaagattgtttcaattgttgtataccaactcagttttatgttatttatctctgtcagggtacctctccttcccattagtaaccatctttttacaacctccatcaaatcattatttaaaaagttgccttttctttcttcatctaccctgtagactactattctttttcatgcaaattccctataatttaaggcaatagttaaacatgttgcacttctgtattttgagttagctgagtggctttctctggctctcttgggttttactttctgtacaaagaaagcacaatcaagttgaaggtagcctcttagtcttgcttctgtagtttattcagataaagccctaaacttgattctgaaaaataaacacataaaatgtctgagatgggccaggtgtggtggctcacacctgtagtgccagcactttgggaggccaaggctggttgattgcttgattggcccaggagttcaagaccagcctgggaaacatggcaaaacccagtaactataaaaaatacaaaaagtagccagggatggtggtgcatgcctgtagtcccagctagtgaggaagctgaggtgggaggatcacttgagcccaggagggcgaggctgcagtgtccaagaacatgctactgtactctagcctaggcaacagagcgagaccttgtctcaaaaaaaaaaaaaaaagaaaaaagaaatctgagactaaaccataattggcaaattcaaaatgaatgcatggactgggtgcaatggctcacatgggtaatcccagcagtttgggaggctgatatgttagatttgcttgaggccaggagtttgagaccagcttgagcaacatagcgacatcccatcttcacaaaaaataaaaataaataaattagccgagtgtggttccacacacttatattcctagctactcagctgaggcagaagggtcccttgggctcaggaatttgaggctgcagtgagccatgatcacaacactgcactcaagcctaggaaacagagcaaggactctgtctgtaaaaaagaataaagaaacgaaggtgtgtactacttagattctaacaatcaaagaatgtgtaggatgttttctgagatgaagttgcagttttttgttaactattttgcagttctttgtcatcttcaccttcccaattaaaaggagagaaaaacccagcaacttgttttagatacgcttccagaatgcagggactttgattttttgttttattttgttttgggatgaggtctcattatgttgcccaggcttatctcgaactcctgggccgaagcgatcctctcacgtcagcctcttaagtagctggcactacagatgtgtgtagccttacccatctaattttgaggagaccttagtaataaattctaaaatgtttttgaggttataggacatggtacaaattgaatgggagccaagagagtatgtactgatgttcattgatatgaaacttaattttaagtgttaatttttatgatgaataaaaagcacttggcatgtttgctaggcattttgcagcttgtatctttgcaggcctagccagaatggactgttttaacagtttgggttgcttaatctgctgctcactctctggtggtaactaaarggtaattgtagcccatatactggaaatagcatttcattaaaattttatcactttcaggaaggtgacagcattgagtgaggggtggaaattcactgtttagtgatttgggcttggttttaattcagaatttgctcttttctcttgatatttacttaccatcaacagatctaggcaaaggaagtacacatcggtttagggttttgatctaaaatactatccttggtttaaatatacaagtaattagtaagcagagcctttccagagcygaagggtttctgaagggattacttggttttgaacctctttctgctttaataactgcaaacataatgtgtgatctgtcttcccttttagagcaaagccggagagatgatttggaagccctaggccatatgttcatgtatttccttcgaggcagcctcccctggcaaggactcaaggtatccttgaaagtgttcagtggagggctttgtttcaatgctcagttgttaatgaaggagcctctggcttcatgtttttaagaaatgtgtagggggctggccagatgcggtggctcatgcctgtaatcccagcactttgggaggctgaggtgggaggattgcttgagtccaggagtttgagatcagcaacatagtgagaccccatctctatttaaacataaacaaataaatatttttttaaaacaacacacaaaaaggattattggctaattggctctggagataagaagcagggactaattacattagtctacattataaatgctctcctgggctttggaaactgttttgttcacatttgtcttccgtttcttaatttttccttgttcttggattttccatgatcttttccctcatttcctcccaggcttgacagtgctgcttttctctctgtgttggtattcctcctccactaccattatgtagcaggaggagtgttcccagtatgtaagggaatttctggaacaaattgttgacaacagctgctacacattttaccagaaaggccagcagggtgtactcctcaggaaaacttggaaaatatttgtttatcctatgtaggytaagaactcacctgaactaaaatgaaaatccaggtttaagattgcttttcaagtgtattattgaataaatgcctattcagacaatatctattcattgcaaaatgtgtagagtttaaatagccttccttaggtaggtgtcagtacagtggttacatgtcagtttactattataattatgagcattatcattactctgtgcctttggctgtttggctaggaaatggtgagcttctaacccattgtaagtcccattagtatcttgtgagacttttttttttttttttttttttttttgagacagagtttcactctgtttcccaggctgggctcgctgcaacctccacctcccaggttccagcggttctcctacctcagcctcttgaatagctgggattacaggtgcatgccaccacgcccagctaattttttggtttttgttttgagacggactctcgctttgttgcccaggctggagtgcagtggtgcaatctcggctcactgcaacctccgcctcctgggttcaagcaattctcctgcctcagcctcctgagtagctgggactacaggcacacgccaccacacccggctaatttttgtatttttagtagagacggggtttcaccatattggccagactggtctcaaactcctgaccttgtgatccgcctgcctcggcctcccaaagtgctgggattacaggcgtgagccactgcacccagccaattttttgtatttttagtagagacggggtttcaccatgttggtcaggctggtctcgagctcctgacctcaagtgatcacccatctaggtctcccagagtgctaggattacaggcatgagccatcgcgcctggcccaagacatattttttggttgtaatttatttcaacatattaatatggaaagaaacttaatcagtagtttggggtactcctacaccccctcttccagaaaggcaggatggttcattttgctgtaggctttctagactattgtcctaaaacgtaagacttccacccattccctttgagattttatttcttcactcttaaattcctctcctgtcatatacatcttctcattgatttttatagctttcaaatagagtttcatgtcaaacttggtcatcatacagccacacaatgcattagtgtattattaattgcttgaaactctctcgttgtccataaatcattttagtggtagttgtagatctaaaatttctcctatttacttcagaacactattgcttaagtctgagtgcagcaagctaggtaaagcctgacaagaattccctaggagcccactgttgatccagggttcagaagccctctggctatagctctgagcataccagacttgggctgcttttgagttactgacatacaccaaacctgttagccatggctgtaccatagacaacttttttccctctggaagcacattgttgaaagacatttttcagttattgttttttttctgttcaaagtctcaatatatgtgtagtagaattacttatctgtttcccccacctggattagcagtacttttagagctgatctaagagagaatgctgaatcatattgaattatggtggccatgggatattactaagcttctgcaattttgaaaatattggccacataatattgttattttcttatcctagccactcatccattatatttgatggtgtttatctgagacaactaaatattttcacaagtaaaattttccagaacacagcagatgtttgtatatatctaaatatataatttctactacatttcttatttgttagtgttagaaaaaaaatcaagaccaacaaatactgcgaatttgagtgaaacaaccattgtgtccaaaaacataytgaatctcccatgtttaggccctcttttaaagtaactttctctctttactctctacaggctgacacattaaaagagagatatcaaaaaattggtgacaccaaaaggaatactcccattgaagctctctgtgagaactttccaggtgggatgctaaaaagacattccagkgtgactgagctttgaaactaggtagagtccatgactgggtatctctagataggggtgctgtttaggtaattaacatttccttttgtgatacagaccaaagtaggttttatcrcttttattttgtcagtaaagaaaacatcagtgtcaaattgtcygtataaataacccctttgtggcccaatgcttccccacaactgctatggaaagcattcagctaatgagcagggcctttcatctctttcctaacagaggagatggcaacctaccttcgatatgtcaggcgactggacttctttgaaaaacctgattatgagtatttacggaccctcttcacagacctctttgaaaagaaaggctacacctttgactatgcctatgattgggttgggagacctattgtaagtatccttttttttttttttttttaacctcattacctcctttctccaaccagcactgcctcatgcctttacttgccagtctttctgcttgaatctttggtaaaaatattcctttgatcgtagactgtatatttactagccttgtctgggtgttgccataggttgctcttactagttcagaagtaggaagtattttttcctagtaatataggaagataataacttgtgtgtcctaagataacagaatttaagcccagtttttaggagaagtttcatttgaatgattcagaagtttgtttgtttgtttgtttgttttcccaggctggagtgcaatggcgccaatctcggctcactgcaacctccgcctcctgagttcaagcgattctcctgcctcagcctcccaagtagctaggattgtaggcacacaccaccacgcccggctaatttttatatttttagcagagacggggttttgccatgttggccaggctgatctcaaactcctgacctgaggtgatctgccctccttggcctccgaaagtgctgggattacaggcgtgagccaccacacctggccccatgattcagaagttgatgccacatacgctgttaatgtacttgacctttgtagcagtggaacccagcatcataggaagcttttgaatttgttgttctggtcaggggttcacagggccaaacagatatcagtggaggaaattttttttttttttttttttttttttacggagtttcactcttgttgcccaggctggagtgcaatggtgtgaactcagctcaccgcaacctccgcctcccaggttcaagcgattctcctgcctcagcatcccgagtagctgggatcacaggcacgcgctgccacacctgactaattttgtatttttagtagagatgggatttctccatgttgctcagtctggtctcgaactcctgacctcaggtgatccactcacctcggcctcccaaagtgctgagattacaggcacgagccaccgcgcccggccctggttttttgttttcgaaggtaagctactctccaatgaactattaaggaccaggctgcctcccttttgcagatgagcaaactgagaagacaagacaacttgaaagtgctcttggtagctgaaaataattactactactctattagaattagaatcattctgtcctttgcatatgcatcaagttggacctgtttcccccatttgactttttgtttcatttttctagcctactccagtagggtcagttcacgtagattctggtgcatctgcaataactcgagaaagccacacacatagggatcggccatcacaacagcagcctcttcgaaatcaggtatgtgttgatcctccattctttcagacactacccttcttcttggctaatattaaaacccaaattcttcagcttctccgctttagtgtatgtactgaaaataaagatcaaatgcttgccatttcttacaggtgtggtatgactttcaagcaaccctcagggcatgtatagttgcactgagatgtggccaggtgccctatatgaagcatccagtctaaagagtcagcctggccaagtgcagtggctcatgcctgtaatccaagcactttgggaggccaaggcaggtagatcacttgagccaggagttcaagaccagcctgggcaagatggtgaaaccctgtctctacataaaatacaaaaaattagttgggcatggtggcacgtgcctatagtcccagctactttggaggctgaggtgggagaatcacctgagcccgggaagtcaaggcagcagagagccaagattgcttccgcatttgcactccagcctgagtgatagagtgagaccctgtcttaaaaaaaaaaaaaaaaaagtgtgtgggcctgtcagagtctgttggctgttggggggaactagctataagttaggatcagaggcatctaccataggaccaaaagacctgttggaggctactctgggcacagtgcctgtggagtagccctactcgccaaggagcagtttaaaaaaaaaaagacctgtcgcacagacaggatgtaccaggtagcccactttgggtctcatctgtagtctggtctagagctcttgccagttctggtttttccttgctggttaagaatggtaggtactttggacttccaactgacttgggcatgaaatggaacctccacaccaccccttgttcttctacccgggcaaattatagagctggtcaagatttgagatggacctgcagtgaagactcagcttaggcgatgtcatctgtccttcattgttcgttgtttggaaaactagtggtctcagtgagggacatctctcagcctaaagacagataaggcaaacacacaccaaaaaatcaacaagtttgacatttttaaaaagggcttatgtatttgggaagtaaatatgacataggatttttatctttatattaaatatattgctaagagaaaaacagagaccacagtaggtaaataagcaaagcataataaacagattacatatttttaaaataattatcacatatcaaattagcttatttcctctccttatgatttcactttcttgtattaacatttttacaagaaaatacaaaaacatttatttcatagatgcacatgtgcaagtatataggttaagaatagtatataaacacacacacacacacacacacacacacacacacacacacacatgtccaatggagtacacccacaaatatattttctcaccagtaagtatatactcttggcaaaatatgtggtttggtgggtaagaaaaaagtatgtaaaaggaggaaagccatttactagagagtacatataaacgagaaaataggtgggcaaaaaagaaagggttaagcaaactctgggcactaattgggtccatagtcacatcctttaaagtcgttgtttaagatttataatttgactgacttctggtttgacaacaaaagactgttgacttctgcagttctctcccatccctccctttttaaaagctaatagctagtgcaggtgagggcacagttaaactgacatattgctgttgattttacgaattgtacaaattctctagaaagcaatttcttttttcttttctttttctttctttttttttttttttttttgagacagtgtcttgctctgtcacccaggctagagtgcagtggtgcaatctcagattacctcaacctctgtctcccagattcaagcaattctcctgtctcagcctcccaagtagctgggattacaggcacataccaccatacctggctaatttttgtatttttattagagatgaggtttcgccatgttggccaggctggtctcgaactcctgacttcaggtcatccacctgcctcggcctcccaaagtactgggattacaggcgtgagccactgtgcctggctagaaagcaatttgatcaagttattttcttctctgatgaaataccttacttcttgaaatcaatcaataaaaccactcaaagtataggttatgtgcataaaactgttgcattgtcattggtagcagagatatagaaatgatctgcctatccacctataaaggcatggttataaatctacttcacatcctttattgaataaactgggttatagtaaagtgagctggacgggatggggaaataagcagaatcaatggaaggagatcaaaattattaacagaaatagggttggaagtgtagtaatatattctaaaatattttaaatgaagttttattactctataatgcggccaggcgcagtggctcacgcctgtaatcccagcactttgggaggccgaggcgggtcgatcacctgaggtcaggagttcgagaccagcctggccaacatggtgaaaccctgtctctactaaaaatataaaaattagctgggtgtggtggcacatgcctcaaatcccggctactcaggaggctgaggcaggagagtcacttgaacctgggaggtggaggttgcagtgagacgagatggtaccattacaccccagcctgggcaccactgcactccagcctgggcaacaagagagaaactccatctcaaaaaacaaaaatgcatttaagtagaaaatgtatgtaaagaaaaaatagataagtagtgtcatatcacagtcaacatatatccttgtgtctctttttttttttgagacagagtttagctcttatcaccaaggctggagcatgatcttggctcactgcaacctccgcctcctgagttcaagcgattcttctgcctcagcttcctgagaagctgggattacaggtgcctgccaccacaccgggctaatttttgtatgtttagtggagatggggtttcaccatgttggccaggctagtctggaactcctaacctcaggtgatccacctgcctcagcctcacaaagtgctgcaattacaggcatgaaccaccatgcccggcaccttgtgcctattttttagaatattttttattttttaaaattcttttttacctccattctcttagaatgtgatagaattttttttaaaattttatttatttatttattttgagatggagtcttgctctgtcgcccagggtggtgtgcagtggcrcgatctcgcgtcactgcaacctccacctcccgggttcgagcaactctcctgcctcagcctcccgagtagctgggactgcaggcgcacgccaccacacctgcataatgttttgtattttagtagagacagggtttcactgtctcccaggctggttgcgaactcctgagctcaggcaatccgcccgcctcggcctcccaaaatgctgggattacaggcatgagccaccgcgcccgtcctagactatcttaaaatatgtgtttcctttactttcctgcttcagtgaatttataaccaatgctgtggttttgcatggatttttaaagtatgaggaaaagagatgattgaaaacttcggttgtcagggtaaaaactgagtagtgaatttcaatgtacttttaaatgaaaagtctctgaccacagtatataattatttaggaaaatctcatctgtatttaactactatgcttatttttgaaaagttgaatcttgaatatctctctttgatatatatttttttctctttttcttttctttttcttttttttttttttttttttttgagaaaagatttcactctgttgcccaggctggagcacagtggcacaatcacagctcactgcagcctcaacttcctgggctaaagtgatccttccaccttagcctcctgagtagctgggactacaggcacacgccaccacgcccagctaatttttttttttttttcgtattttctgtagagacagtttcactgtgtttctcaggctgttctcaaattcctgggttcaagcaatctgcccacctctgcctcccaaaatgctgggagccactatgcctggccctatttttttaattttagagtttttagtatcctgtggctgctaagagattggaattccttcacgttgatgtaaatgttataacgccttcccaccaggattctgaatccttgctgggtaaaattctttctgcactatgcactctgggtaatggatttctagtgtctgttcaacctttggtctatgttaatattacatttcttctatctttaggattgttttcttatgccctttttttttttttaagaaaatttgcagccaaatctctctcttattactctaagaattgaaaacaagatgattttctagactaattcctttcaagttttgaaattagcaaaagaaaaatacagtttctccttgagcgagattgacaggtattgactttaggaacagctaacctttcatcagcaactttgactcagtaaatctgagctgaggacctgctatgtgaaactgtatcctgtgggccagggaaggtggctcacacgtgtaatcccagcactttggaaggctgaggcgggtggataacttgaggccaggagttcgagaccagcctggccaacatggtgaaaccccatctctactaaaaatacaaaaattagctgggtgtggtggtgggcgcctgtaatctcagttacttgggaggctgaggcaggagaattgcttgaacctgggaggcggaggttgtgcagtgagccagtgcacatgagactgtgccactgcactccagccggggcagcagagactttgtttcaaaaaaaaaaaaaaaaaaaaaaaagtatatcctgtggataccaagtagggagtccttgtcctcaaagagctgacaagtagataagccaaatggacagataactataacacaaggcagaacagataagcatcccaagttgcaaattattatcatctgggtttggaagaagaaatttcatctagtctgagcaagacaaataatttgatgagagaagctgcatttgacatgcttttagcagaattaaatgagatggaagaggcattccaagcagaagaatatatgatcaacaacaaatgttttatctagttcagttttctaaaatatatgatgcgagtaaaggagtcctaggagacaaggctaggaaagtaggttgaaaccatttggtgaagctcctggaatgctgggctggcgagttggtgcttattttaagtaggaatagggactaaagatttttaagcaaaggagtgatatgattaaaactctgcttttgaaatcttttggcacagaatgtggtactagtctggcagcaaacatggaaatcattaagcaggcagtgaattcccttgagatgtagagggagtctagatgggttatagtagggcaaatgaaacagaattgaacaatgctacagtgatataatctaccagaattggcagcccacatgaatgtcaggattaagggagaaggaagagtcaaagctgttgcagagatcttgagcctggataattaggaggcatgtggtactattactagagatggcaaagttgggggaggaacttgtttggaatttgaatttaggcatcttgagtttgaaatactagcaatgtattccacctgaagaggtctagcaggcagaggatggttctccagagacaactagagagatatttgggagtcaaggcatagagatgacattgatgataatgcctaaagagtctccttattctgggaaatctgagcctagggctcaacaaactgtttagtctcatacttacagtagaaggagaaagaagagctcagaccttggttttatcttatcccaaaactttggccataggacatttaacctatttagggtgtcagcattctcaaattggagccttgtaagagcagaggtttttgttgttttgttcactgctttaattaaccctaacacccaaaccaatgtttagaatagtgggcacttgatgcatacttgtttgaatgaatgagtgaatgaatgaatctgccaaatgaagggtgcagatgtaaatagatatttttttatagcatagatttttatttaacctttattgaaaaataaattttaagcttttcttcctactcgtttttgtttccacaaagagccattttgcctctgtttggcagctagagtagggctggattgtctgctcaaggggaggggtgtttaaaaaaaaaaaacacacacagagcagtcttttgcagcaaagaaagttcaggtgattgctgggcatggtggctcccgcctgtaatctcaacactttgggaggccgaggcgggcggatcacctgaggtcgagagttcgagaccagcctgaccaacatggagaaaccccatctctactaaaaaatacaaaattagcccggcatggtggtgcccgcctgtaatcccagctacttgggaggctaaggcagaagaatcacttgaacccgggaggcagagtttgtggtgagccgagatcgtgccattgcactccagcctgggggacaaaagtgaaacccgtctcaaaaaaaaaaaaaagttcaggtgatcttattagttcttttccatcacaacaagaatcctattttccttgtattctgggaaaattttgctttgcttgtttagattttaggtatattgaattgagtactgtttggtttatctatatacaataataaatcccaaatatggttcctaaaggactgcatttaaactcacatatattggatctgccttttaaaactatctttattccaagcacttctttttttttaatagagatgggatctcactccacctctcaggatagagtgtagtggcgtgatcacagctcacagcaaccttgacctcctgggctcaagcaatcctcccaccccagcctcccaaacagctgggactatgggcgtgagccaccacacctgactaatgtttatttattttttgtagagacagggcctcctggtctcaaactcctgggctcaagtgatccttctgcctcagcctcccaagtaacggggattacaagtgtgagctaccatgcctggccaagcacaatttttttgaacataaattttacctaactagagaactataattaaactatgaatttggatagaataaacgttcctaaaagctagatccattcagaaagatcccagttgagttagtctttccatcattttatacttcgtgtttgtcctttcccagtaccaaaagttgtaaatcttgccatgggtctgattcctctctaaagaactgcgtattacaatccggcagaaaggggatgaaaaccttaatagttctgcctgcttgcttctacctggcaaaacgtcctttgcattatctgatcaaattcaatcaggaagtaagtcctgccggtatccacagatctgatattagagtacaacatattgtactgtcataggttttattcagtgtgcttgttcaacacagtaaatgtagactgttgcattgactactatgtgcatgcagcagcactcttcctgccctttcagtactttaaatccaagcttgtgacaatccttacgtaaatgctacataaacattacaccgcaatggttcaggagttatgatagcgtctcctttttctctggctgacctcttttattatggtgggttttgttgtgggtatgtgaaaaagaagggctacttagtaactagcaggttagaggaacagatcccattttgacagtggagagagtcatattgactattaaaagcttttaaatggtaacagacatggtatcctaccccaaaatgtcacttactcttttttgtgtttttgtatgtgtagcataggtgttttgttttgttttgttttcattcgccatgtgaaaagagatgcgtagcatatgtttaagggaaagaatttattctttgtaattttgtactaggtggactgttcccttgcaaattctccaatttgactaggaaaatatgaatcaaagatcagtaaaggtaatctctcatccttccaaaagaaccatatttaaactaactcaataccttataatacacggaaaaataaacgcagaatttaagagtcaaatcatgtgaggtctgaagaagatatgcctccagtaaaagagtgttttggatttgtttgtatctagactgtaagggaatacatttaaaggacataaagccttagaaaaatatattgtggctggctggggtcggtggctcacacctgcactttgggaagctaaggcggtggatcacctgaggccaggagttcaaaaccggcctgaccaacatggtgaaaccctgtctctactaaaaatacaaaattagctgggcatggtggctcatgcctgtaatcccagctacttgggaggctgaggtaggagaatcgcttgacccaggagtcagagtttgcagtgagccgagatcgcaccactgcactccagcctgggcaataagagcaaaactctgtctcaaaaaaaaaaaaaaaaagaaaagaaaagaaaagaagagaaaaagaaaaatatattgtggctttgtgctgttatgcttagtgactacagcttgttatgagcataatttttctaaaggaaacattaggccacattgctaaataggcaaggtagtcagttatcttcataaaatgaataccttaaaaaaaaaaaaagctgatatagttatytgtttctgtctttttacagagtactgtttagttctgaccgaggctcagggtttgctagttgaaggggctaagtttgcgcagagataatctgcctccttgtgacctgcgtgcagtttcctaacatgctgcctgccatccagtaggagcacagacagagattgcacactcctcctggccacaggatggccacagctccacatagagctcagtgcaggagacgtctgcccctcctcatttctgggacctttactctgagaggagctttgaaacaagcaagtgcaaaactgaaaatagattccttagcgtcttctgttctatcacctagtcactgcggctcacctcttctcttaattctgtattccatattaaaagtttttttctttctgtatgtgttaagtgttttgtatttcagcagacacctgtgttctaacccagctccttgtaggaggaaacttggtgattctgaagtaatcctatctagataaaccaacatttcctagggaggtatcttacaccattgtaaggatagggcagagtttgaatagagaattgcagacttctagggtggtttccgtgatttttctaaaagcgtcacagaattgatactctcgtctctggatagtgttgagcctgggaataatccccttttcaggttgttgtcagtgatttttaaacttccctcctatttgataaggtttatagaatacaggatatctctgcacaaatgacagattacatggcataacccctgtctggcatgggaaaactggttatgtttcatgagcttaatagaaggaagtttttagttttgttcaagtatatactttttttttttttttttgagacagagtctcactctgttgcccaggctggagtgcagtggcgcgatctcggctcatgcaacctccgcctcccaggttcaagcaattctcctgcctcagcctcccgagtagctgggactacaggtgtgcaccaccatgcctggctaattttttttgtatttttagtagagacggggtttcaccgtgttggccaggatggtctcaatcttctgaccttgtgatccacccacctcggcctcctaaagtgctgggattacaggcgtgagccaccacagctggctcctgttccattcttttcttcttccgtcttacccccaccatatcataaaagaaaaaaaagaaattttaatattggaagtgtgataaaaccagaatgtaatccagtatattctctttgctaaccttttggtactattcagtctcattcttgttagtttatagttgaagacagttaatgaggctgagaagacttacatgagaggccaaaatgtttctttataaatggcagcttttaaggtattttttgagccataaagtgaagtagataaagttgtttgtatatgtaatcaaaaataattttttaaaatgagttttttatgaagaataggatttggtgatttttttttttttttttttttttttttttttttaggcagatctcactctgtcactcagggtggagtgtggtggcacaatctcagctcactgcaacctctgcctcctgggttctcagcctcccaagtagctgggactataggcatatgccaccactcccggctaatttttgcatttttagtagagacagggtctcaccatgttggcgaggctggtcttgaattcctgaccttaggtgatccgcccccctcagcctcccaaagtgctgggattatggcactttgttagtgtcactcttacattaatccctgccaaatgaatgctgggagagatttttttcccctgccatagggcataggtgggggttttcactttttcaacagtcttctgtgttttctcaagtatttttgttacctttacctttcatttatgctatgctggattgctactttcttgtttcaagatttacctactacatagtaaaccaatcatttccatgaaggtgatgcaatcacgactgaaaattttaaagcgttcccccaaggagttaccactacttgagattcctgctcctgctttgggggacttacacactccatgtggagctctgcttttcaagtaatgcagagaaattgactttgctgaatgacttttctactcatgcacctcttgagtgacatttaattagatgtgtatgcatgagtgatctttaagaatgaaggatttacatgctgatctcttccactagtttgcttaatctaactagctactgtgctgatgaggcctaatcataactcctgtgtacacagtattgcctagaatacctttcttggagagttacactagcagactgctgtagttgtcagctttctttggtttcatctatttcctaggcattctgttgctttctaaaactgcaaatggccctttctactatgttatcctctagataccggtccaagctcttaaattccagaaaacagtagccctagaatttaacatcttaccgaaaacttgcttccaaagtaataaacccgcaacccctaggttcacatctgtacttagttttgatgttttcaacagatacagaaggcattggcgggcagtagtatggtatagtgtgtttttccttcatcatagtggaagcatttatgaagcaatctagagtgttaacattagttttctatttatctttaaaagataaatarcatattgctttgagaatggagatggaatgtgatttttaggcctttgaaaaatgtcttggtattttcatttaaacaaaaatcttaaatctttcaacaaattatttattgaactagaatgaatataaagaaccacatagccctgtgaatcagacaatagcataaaaccagagttcttatgtgtagtcagtaaaaatggaaataattgttgatcagctgtccagggttttcttaactttaaaagcccatgagtatacatgaacatacatttccagccattttctattttatctgcctcaaaaacaaatgcaggctgggtgccgtggctcacacctataatcttagcactttgggaggccgaggcgggcagatcatgaggtcaggaaatcgagaccatcctagctaacacagggaaaccgcgtctctactaaaaatataaaaaaattagcaacctggtggcgcgygtccgtagtcccagctactcgggaggctgaggcaggagaatgacgtgaactcgggaggcggagcttgcagtgagccgagatcgtgccactgcactccagcctgggtgacagagcaagactccatctcaaaaacacaaaacaaaacaaaaaaacaaatgcaaaaacagagagcattcatgagatgtaattgcatttagtatgtattatagaactcaacattaaatggcttaccattgtctggatttttttaagcacttaagtttttagaaacctgacagtactgtataatagtttaagagcttaaatattatatttcaatattacaaaaaataaaaagttctagagaactgaaaaagtctatcactgataggtttagttatagatattacttctaatattacaagaataggtttattctcagatctccagcagtcagaataaatgagactaagtgctctgaggatatagacaatgtcagtaagtttataaaatatggccggcacggtggctcacgcctgtaattccagcactttgggaggccgaggcgggtggatcacctgaggtcgggagttcaagaccagcctgaccaacctggagaaaccctgtctctaccaaaaatacaaaattagccaggcatggtggcacatgcctgtaatcccagctacttgggaggctgaggcaggagaatcgcttgaacctgagaggcggaggttgtggtgagcggagatcgcgccattgcactttagcctgggcaacaagagtgaaactctatctcaaccaaaaaaataaaaataagtttatgattatgttgtacaccagtcttattttggaaaatgaaacatttgaacctcttttggcagaaataattgtagtaggggaatattttgggtagctttgattctctctaacataactagcagcataaaatcaaacccctcatttataaggtaatagagcaagtccatacagctgccttctcatagaatatgtttattctctgaggaagagcagagaaaatatgaacaggatcctttataatactcttgtccatatgacttcgtattccattaataaaaaggagtaaattggccaggcgtggtggctcacgcctgtaatcccagcactttgggaggctgaggcaggcggatcacgaggtcaggagatcgagaccatcctggctaacacggtgaaaccctgtctctactgaaaatacaaaaaaaattagccgggcatggtgctgcgcgcctgtagtcccaactactcaggaggctgaggcagaagagtggcgtgaacctgggaggcggagcttgcagtgagccgagaatgcgccactgcactccagcctgggcgacagagcgagactccgtctcaaaaaaaaaaaaaaaaaaaaagtaaattgtagctggtgtacaaagctctgatttttacgagaaatgcctttttggtgacttacgggtgagctttaagcaactcttgtcaatgagatactgaaatatggggagtgaatatagaccctcaaaccattacttccttgcccttcgttttttatagaatacaacttttatagctgtgaacatttgtaagatttatagtcctttctggttttcatgcagagcagcaatatcacatcctaacccctgcarctgtttatatcagcagcaattaaaatttgatttactaatccctcattgctgcctctccaactactcatttttcatttttgtagagccttaggactgttacagctgagcattatgatgttaacaactcagccatctggcacaggggaagaggcacctaaacagattcttctggacaaaagtcacatatgagcaagatcagaatagtagcagatgtaaaaagcaggtaaagaaggagagcctgaatgatactaaggtgaaagcagaatccaaagaggtttttagttgaaggtcgaccctccttttgctttccagaagaaaataattcatagtatcatattaataagtaaactttttctaattcagtctagacgctgttagctagaagaaccaggcaaacgatgtagctattttttttgttattattattattattttttcgagatggagtcttgctctgtcgcgcaggctggagtgcagtggcgcgatcttggctcactgcaacctccacctcctgggtttaagcaattctcctgcttcagcctcccgagtagctgggatcacaggtgtgcgccaccatgcccagctcatttttgtaattttagtagagacaggctttcaccatgttggtcaggctggtctcgaactccagacctcgtgatccgcccaccttggcctcccaaagtgctgagattataggcgtatgccaccactccgaacaatcttaacattctgagtttgatctgcttagtggctactgaaattttacctctatggaaactaaaagatgatcccagctttgactgtgtgttttttccccctccctcctcttttggtcgttattggttttctggttctgggtaaggagggtgtgatatagattcatgtattgactcattaaggctaaaatgaatgtagacaagcttacttttcctcactgctttccagtggttgttagtttaaaatccaaaaccgaaagaaaaacctacagggacacgaatgtacttgattttgttattgcttgctgttgcttcacctttccttccatatcttgctctcatgctttctaacgcctaagcagaatgtatcatcagagcgccgaggagagtgggaaattcagcccagccggcagaccaatacctcatacctaacgtctcacttggctgcagaccgccatgggggatcagtgcaggtatttactgcctttattgccttttcctggcctttccagcttggctggtggaatgttggcttgcttctgaaccttcggcagccttagaaaggaagcttacaggaagggctaattgaatatctctgtagattttctgtctaggtggacttgggtaagagtcgcttgttaaaatgattacttcctgttgtcattgactaagaaacatctatatgatttctgatactgatttctggttaacctagtcctaccaccttgatgcattcatgataaaccataaaaataacatcaaggtaggattgtgttagtgtcaagtctgtgaattgtaaagacctgaaacttacaagtattttttgaatagaggactaaaggactgcatatgttgctcattccatgatatgtgccttaacgcataagctgagaatgttaatttgtataagtcatctgtttctgagtgggtacccaggaagttgggctgtttccttttttctccctggaatcaatgtgatcttaagaaaattatttctgatttcatttgggctattctgaatctcttttttctgtttagtactagaacatctggtatctcttaacttgtcttacatgtgaatgtttttaataatcttagcctcaatattgttctcatactggtaagtgacaccatcagttgggacacacagtgaactcagagctgtcaaacataaattcttataaaggtgcagacaggtttgtacatgtagaaatgcatcttggtagccttgatcatctaggatatgctgttacaaggagtgattcatggaaagatcttaatcacagcttgaaagacagttttggccctatagaaaaccacataggatcatataggttaaaatgatggattgaggctgggcgtggtagctcctgtaatcacagcactttgggaggccaaagcaggtggatcacttgaagtcaggagttcaagactagcctggccaacatggtgaaaccccatctgtactataaatacaaaaaaaaaaaaattagccaggcccggtggcgcatacctgtaatcctagctactcaggaggctgaggtgggaggattgcctgaatctgggaggcagaagttgcagtgagccgagatcatgccactgcatactctagcctgggtgacagaatgaggctccatcccccccmaaaaaaaccatgatggattggacaagactgagcaacaaagggagagctcatctctacagaaagttaaaaaattagctaggatggccaggcgtggtggctcgcacctataatcccagcactttgggagcccaaggtgggcagatcacaaggtcaagtgattgagaccatcctggccaacatggtgaaaccccgtctctactaaaaatacaaaaattagctgggcatggtggcgcatgcctatagttccagctactcaggaggctgaggcaggagaacgcttgaacctgggaggcagaggttgcagtgagccgagatcacgccattgcactccagcctgggtgatggactgagattccgtctcaaaaaaaaagagaaaaaaatcattgctcttaggagccaggcacagtggctaacaccgataattccagcattttgagaagcctaggcaggaggatcacttgaggccaggagttcttgaccatcctggcaatatagcaagatattgtctctacacaaaacagaaaaattggctaggtgtggtgctatgtgcctatagtcctggctgccaggaaggcttaggcgggaggatcgcttgagcccaggagtttgaggctgcagtgagccatgatcgtaccactgcatttcagcctgggtgacagagcaagaccctgtctctttaaaacaaaacaaaacaaaacaaaacaaaaaactcaattttatttctcaggcacactttcttgtgaagccacatgaggatgtgtgttatcagaattaatagaacaagagagtagcagctgtgtgcaatagctcatgcctgtaatcccagcactttgggaggccgaggtgagcagatcacaaggtcaggagttcaagaccagcctggccactatggtgaaactccatctctactaaaaagtaattttaaaaaattagctgggcgtggtggtgggtacctgtagtcccagctacttgggaggctgaggcaggagaatcacttaaactcgggaggcagaagttgcagtgagctgagattgcgcccctgcactccagcctgggcgacacaacaagactctatctcaaaaaaaataaaaagaaaggaatatctgggatccaggaaaccagagatccagcacaggaaagaaacaaagggaatccctaatataataataaagttaggagatcctgggatctgtacaccaatagaagagagcagcttgttcaaaacagagctgcaagagcagctctttggtattttcctttttaacattatggtttatccttgtctttttataattacaaaataagcatatttctttttctctctttttttttttttttttcgagatggagtctggctctgtcatccaggctggagtgcagtagcgcgatcttggcttactgcaactgctgtttcccgggttcaagccattctcctgtcagcctctagagcagctgggattacaggcacgtgccaccacacccagctaatttttggatatttagtagagatgggtttttgccatgtcatccaggctggtctcaaactcctgacctcaagtgatccacctgccttggcctcgcaaagtcctgggattacagatgtgagccaccgtgcctggcctcgtaaagtgtcctttagaaatggatccaactgaggtgtctttggcaactcttttgaaacatgcaacttcctctactccctataaactaagttttaccagcttccttggcacttagatagaggacaggcagttacaccatttacctaatactatgttcagctctgctgctcctcattactttggcctctttgggctgacactgtttttagcataccttttgcaaaccagattaacaatactttcctaacacaacagatgtccacatatttctgagttgtctcacttgccagaggtaatgtagtaaaatcatgtttggcctaacctgggtgacttgcagacaccatgaccctgggagggagtgcagaatctaagacaagaaaagtttgctctgataaggcacatgaaggctcctgttccaacatatttaatgggcagacccccatggttctcatccttccagtatttccacagatcttttatgtgtggaaggcctaaatgcaagaagataatatattttccctttcaaaaagattcctctaaagttgtctgaattaaaatgtttagggagcttttagaaatgttcaggaccaagtaaggacataagacttagaatgacacatgagttgaagtactgtttcctttggtacacagctctgatttctcctcacagtgacattttgagaaatgaaactaataacccaaattattgagactcctaaaagggatattaccaggtctgaacgtcaaaacagtccttcatcttagtctttctcatgagtaatgctttaagatattaattggtcttgtttggtatagccagagtaatgagcgattaattttaatagtgattaaagcaaaataaatgtctatttgaagtatgcaaatcttttttttttttttttttgagacagagtttcgcattgttgtccaggctggggtgcagtggcatgatcttggctcactacaacgtccgcctcccaggttcaagcaattcttgtgcctcagcctcctgagtagctgggattacaggcgcccgccaccacgcccagctgattttttgtattttaatagagacggggtttcaccatgttgtccaggctggtctcgaactgctgagctcaggcaatccacctgtctcggcctcccaaagtgctaggattacaggcacgagccaccgtgcctggccgcaaataaagctttttataatgaagcttattttttattatcttttataatgacattatactaaaaatttatttatttatttatttattttttgagacgaagtctcgctctgtcacccaggctggagtgcagtggcatgatctctgctcactgcaagctacgcctcccaggttcacaccattctcctgcctcagcctcccgagtagctgggactacagacgtgtgccaccatgcccggctaattttttgtatttttagtagagacggagtttcaccgtgttagtcaggatggtcttaatctcctgacctcgtgatccgcccacctcggcctcccaaaatgctgggattacaggcgtgagccactgcacccggccataaagttatactaaaaatttaatagaaaaaaaataccagccagatcacttggggtcaggagttcaagaccagcctggccaatatggtgaaaccccatttctactaaaaaatacaaaaattagccagatgtggtggtgcatacctgtagtcccagctactcgggaggctgaggcaggagaatcgcttgaactcgggaggtagaggttgcagtgagccaagatcacgccactgcactgcagcctgggcaacagagcgagattccatctccaaaaaaaaaaaaaagaaaaacataaagataatattgtttaaaatgtcagtaatttgttattcataagattctttttaattctttaaaatttattttctaaacatcattgtatttaattcccttcatatttatgaagttgataggatcatggtcatttgccttgtcttatggaattagaaaatagggctcacagaggatgttaatggtagaacaaggcctagaatccaactcttccatcacttacacagtgtttgttccactgcctgcagttcagtagtttgacaaaccagacctccaacctgaaataattaaacggatgctgtgaaggcccagatgtgtagcctttaagtcttaggtatgtttttggtacaattaagtttaaaagtagagaatggaggctctgtttatgtctcattcatttgagaccacatgctcattgatacagacaagatgtctagtctgtaaaatggggataacctcttattccttagattgcccaaggacagtgcttatggcccaagtggcaatttgtagcgaggagaatttaggaagtataagccatgtgaaacgctgtgagcaggccccatgacccagagtcaccaggtaattctcagtggtgatgcttactaatgtttcattcgtgtgagtagaagccaagacattttatttaacgtcttgtctagttcctgaattgtccactagaaacttactatgtttcctgtaacctttgtgctcacagaatgagtttaccagtattatcactggtatgcagccagaatatgtccacaagaagcaaatgaagcactgaggaaattaacaggatagcattagagtgaggagctgtggttttccaatccatataccctccttcctcaactttttggttttgctggtttttcttcaactttttgtattgaaaatttcaactctacagagaaatcgggagggaaatgcaataaactcttgtatatctttaaccttgctgaacgaattattaagattttgccatatttgctttaaatctatgagtgaaagtgtgtgtgtgtgtttgcttgctaaaccatatgaaagtaagttgcagacatcattatatcttatcccaragtacttcagcctgtatcttctaagaacgaagacattctaagaaagttaatttcataatatctaatatatagttcatgtcacattccacctaattccagttgtccccagaattaatattgtagtgtccaggatttaatcaaggttcatgcctcacattaaccaatgcaatatgcctcatcagtcttttacaatgtcttagtctcttttaatccgttttaatctttaagtctccctgtgtttaaacaaataaaagtcttctataaagattcagctggaggccgggcacagtggctcgtgcctgtaatcccagcacttcgggaagccaaggcaggtggacaacctgaggtcaggagttcgagactagcctggccaacatggtgaaaccccatctctactaaaaacaaaacaaaacaaacaaacagccaggtgtggtggcacatacctgtaatctcagctactcaggagactgaggcaggagaaccgcttgaacctgggaggtagaggttgcagtgagccgagatcatgccactgcactccagcctgggcaacagagcaagactctctctctcaaaaaaaaaaaaaaaaaaaaaaaaaacgggttactaatgagaacaataattatttcttgtttagaaataatagcggatatagcttgctagtaagtagtattcaccctatctgtcccaaaggctacgtgtactatatatttcctcccaccctcctctttatgactattcaggaaatttttgtggattaactgctggtgaggacccctgagctagaggcagataagaataaacagttacggagagagaataacagtaagatgaccacttattgagctgttaccatgtctcatgccactgggctaagcactttctgtgggttgtctgcacagtaaacaccattaggtaagcagcattgttctcccattttagagattaggaagcttaggcatagactgaggatcttgcccaaagacccacagcaaataactggtggagctggggttcaaacttagggctgattagggcaatttctacactatgctgcttcccttatttatgctaggtattatactagacagtctcatacattttcttgtataattctctcatcaacctataagaaacaatctcaaatagatggaagtacttatccaagggcatatgatatccaaattgtttatcctattttgtgttctctcccatgtttcagccaaggtctttaacaagcagagtgttttgtccagcagtgaggccccttttcccacttcccagcacccacataaacaggaataatgtgctggaaatgaaaccaggtggcagaagcagctacacatgcaagagaagcctgattgggtccacattaaccagatgacaggagtgagagccttcacttacatttcggggaccatcagtgagaactgggatggcagtgaacctgaaataaagatcgttgaaataagactggctttccaagggagagtgtttttttaccatcttccctcttgtcggagaggatgtgacaatcttgttatttgtaacttcgaaccagtgctcaaagccatgaggaaatttctgaaggaaagtgtgattatttatagtttctggtacccactgttgacttcctttttagaactttttctttcaacatcagcactaagtctatatcattatagcataataaactgagagaactagacttcacccatcacattcaagggagccaagtgattttacctttagaagtcagccatgcagttatttttaacttaacaaagtaatgtgtgtgtttttgcaatatgaaagaatctgtgtttagaacaaattttcctcatggaaattcacagatattaactctaaaccttggttaagtcatttgttagtgtttccatctgtaaaaaaacctatttcataagatttttgtaaggattagatttacacacacaatgtagcagagtgtcagacacggagtaggcactcagtatgtaagttattatcatcattatatgattacatcattgatattagtgttctcgcatgatatgggcctgggaaccttccctaaattgatcccttaacccaggaaaacaaacattccagacactgcctgtttagcgaccctgtctggcgctggcaagagatttctgttgccatggtgcctgtcacacacttctgtctttctgtttcaggtggttagctcaaccaatggagagctgaatgttgatgatcccacgggagcccactccaatgcaccaatcacagctcatgccgaggtggaggtagtggaggaagctaagtacgtacatctttcaagggggctcttaagtcatgggttgaaaaatcttttctgtctcttcctctctgtgtgctgctcgtctcagactggatttctcatgcttgtaaccacagctttcttccttaactgttttaatttttgcatggtaccttaaggctgctactgcccttctttagctgtgatttcggggaagacagtcacatttttctagttcacatgaaaaagacatagtgaaccgaaagaatcatgttatcagggctacagtggatagtagccatgagcttcttggggctgtggagcttcttgctctatatgggatatagagaaaaatctgctgttaaaccatgggccatgctgaatagcattcgatttctgattgtgggctagcaactggatgtacaatcatggaacaaggagttcagggccattttgttcactctcaaatgattctggcttcagagagactaagtcaggcaagaaaaatattatagtctgcatctgtgaatgagagtgtgggaaaagaatggaagtcatactcatctcaggagggtaaggaggttgccccacacccttttctgcttctcttgcatgtgtatgtcttgccccacccataccaccagccccttggtgcgctgcatggtctgtgtttaaactcttaaaatctggggtggaaggtgagataactgccaattctgctgcaaaagcagcatttctaccacttttttccccatcccaaatttagatccagatttagacttcaagaagataccaggtagggagagatagagacaccatgagtcagtaactgctgctatccctgatatggaggacctttcttgtgagccctttgagaaccttcaggatatcccagggtcttgttttctgaagcagacaacgtatttatagtgatattgtacctaagtagtctcatgagcccccaggtagcttaatacaagccagaacactcttatacctctaaatgtaagttagtgagatgccactgagacctgcattcttccaccttccagatgtactttgtattgttgtctttcctgcctattcccctggtctcctgcccatcttttttatttatttattttttgagacagggtctctctctgttgccaaagctggagtgcagtggcacgatcatggctaactgcagcctctattccccaagctcaagtgatcctcctgcctcagtctcccaaagtcatgaaattacaggcatgaaccactgtgcccagccctgccagtctatttgatgaactcattttaccttcaagaagtcctttctagccaggtgtggtgcttcatgcctgtaatcttagcactttgggaggctgaggcaggaggatcacttgagtctagaggtttgagaccagcctgggcaacataatgagaccccaactctataaaaaaattaaaaattagctgggcatggtggtatgcacctgtagtcctaggtacttggaaggttcaggctgcagtgagctatggtcatgtcactgtactccaatctgggtgataggtgcgaccctgtcacacacacacacacaaaagtttttggccaggtgcagtggctcacacgtgtaatcccagcactttgggaagctgaggcaggaggatcacaaggtcaagagattgagaccatcctggccaacatggtgaaaccccgtctctactaaaaatataaaaattagctgggtgtggtggcatgcgtctgtagtcccagctactcaggaggctgaggcaggagaatcgcttgaacccaggaggcaggggttgtggtgagtcgagattgtgccaccgcactccatcctggcgacagagcgagactccatctcaaaaaaaaaaaaaaaaaagaaaatttttgcttggaaaaccagggcttgaggattcctacccaatacatcaaaagtaaatgaggatgacttgactgtcttttgttgagcccctgctaactgtaggcagcttcagagctcttctcccagcttgtataaggcactgatatataagggggtgagggttatgctggttatgccaggaaaaggccattttaataaggaaacatgctcctattctcagggactttggagatattaatggtactcacagtttttcgatttccatacaaaattacattatcttaaataaacaatatgttactcccaccctctgggctctcaactggctgcactttggagtcatttggggcatggtagaaaatacaaatgtctgagtctggcctcaggcattctgatttaatttattgaaatgtggcccgagcatcaggaattttaaaagttcaggtcattctaacatgtagccaatgttgagaaccactgtaccaagcgtggtctgattcaaacattgtcagagcttgaaggatggccgtacctgttcccagctcccaccccattctcaattcacctttgtggctattactttgaaggctagaagtttagctttggatttaatagtatactttgaatgcagtaatcaaatgggctttagttttatgttatgccctatacaggtttatcttttgaacccattcatctcatctcattttggtaaatgtgtatactaattgtgtatgtgagtgtggtatttgtgttctgtgtgtaagatatgggctcattcacacagagatttcaatctggtgtattctgtattggtataatctaacctctagaatgtaaggagagtttaaagtcttgtcatttagcaaaaaggacaaatgtgcctctttgccaccagcttcaggtttggaccttctaaaagatgtagaaagcataggggagaaattatatttgaccagatgtcatcccgaagctcatggcttagggcatttagtgatttcatgggctatcaatccatcttgcccagagaactgtcagggcccagccatgtgttatttttcttggcctttgcgtgtgggggcaaggaaagggtagccctgtgtccacctggttgatcattttcatgggaagaagtcacagctagagaagcacgaggtgttccaaacagcccctcattgcacgcagctgtgatgccatttgttcatgcagcctgcttgtggggtagaaggggatgatgcttatattgagacacacctcagtactggggagaccatgtgaaaccttcactttcaggcttttgattttgggttcctcacccagcttgtttagtgtaaaggtggaaagaaataacagggtcttaggttttgttctgtgtacaaaacgaacatgtgaattccctttttctctagctccaggacatatgtccttgtttatggtttaaagggtggtgagggcaggcagctttttggttgatttttgttacagtaagaatacaggaatttttggttatccagactttagctataatttaacaaatgtgaacctcatttctcctgagcattaacaagagtagaatttaggtccttctctggtagttataccttaatacagagcagtgaccctccttcctctgattcatcttctaataagataaagtaagtgtcgcttaaaccttttctccctctctagaggaagagctaactgctagctgctttgatcaggcatgttggacttgcacaaaggctagggactttctttttccctcagaatatttgagaggctagcttaatattgcacagtaagacttcatatgggaaccaaaatggttcacccctggtgcttgattgagttcttacaggcagggtcatttgctctttcccctgctgccttcctagaagttgcccaggaaagcccaccctggagctcctaccaactctttctgttttgccttacccctgagatccagctcccaccttgatgcttctgtcaggctcctgtccgaaccctccactttaacgtggggaccaagtggcctgggcctactcagcctaccttgacagaagaagaaactaaacacagacacatactgcatgtttgcatggctcacagggagtcgcttccatttcacctctgtggactaatatctctctctttctctctcttcctttctgtgtttttctctttatatactctgtagctgcctgaaaatgctcaacctgtggtgagtccctctctccagtccattgcaaggggagtggaccagactaggctgggactggcaaagccaaacaaaatgccttaggaacattaaatagcttccataggactccttgtgccataaccaccctgactggggatctagatccataaggtggggatggggcaggcctgtacccaggaattaatctattccttctttcaaacccatcttatcgctgtctcctcctgccataacagtatcccacagtatccaaaattatctatttttagctgagtaaattttctcccaaattaatacaaccagatatggagagggacagaagtaaaagggcaagattactgtatcagtttttatgtagcagttgtgtttactcacagccgcaaggatagtgagttgttgctggataatctcacattctgcaatgtggtctctaacctggaaattggctgctttgggaaaatctgactttttgattcagctggctcttccctctgtagagtagcaacctcaaaaaagggggagctccttcagggagaggtggatgttttgttgttgttgttttgagagttgttttgtttttgtttattgtctttttctttattcctatgtgagagtttagtaggccaaggactgactcagctaattgatatattggagcctgtcttttccactcctggaaaaggttcctggaatgtatttttaggaataacatggagtttatggaaggagaagccctcaagaatccatgtgtggtgaggaacattcttgctacaagacatagccccttcccctgctctcttgcctgtgaccttccaggtactcctgaacttgttggtctgttgcagtctggaattttaactctcccacattgtccgcacgcataaagtcatgctctatatggaggtaacagcctgctagtttcatgactgccatgtttctatttgtcttcagtgactgggttgggcactggtttctgaaccctaactatctaagccagattgcctacaggggcttcctcagggacaggaatgtattaaagaaaacaactgggttttgtggaggtcagatttatagtcttaggggatcaaagaatacctttggctatttgttttgcaaacatgtgtctgtgtaatccgacattgtggtggtctattttttcctgtgaggtgtcagtcacatgatccttactgcagatacttgagggcctgctatatgcttatccaaccctgtgcttggaactctagtggggtggggggtggggttacaaaatttgccccaaagagcttgggtaccatctagctgaagagatcagacatacacatgaaaggataaggagttctgcaggacattgagattactgcccttgagaggctgaggggccaagaggtcaccatggacaggatggtcaaagaagtccttgtaaacactgtaggacttgagttaagtattagaagaaaggaagaatgtacacatatggcagagaaaaggaacatagcaagggaatagctgaagagagagggccaggacatagtaagaatgccatatggaaaaggtagtgggtcagaggcctggggtaagagcactagatggctttgagagtagggagatttggatcgattttgactccagcatgttgagaacttcttgtcatctaaacagtcaaagaatcaactgaaaggaaacctaagccatgaggtgtccaccacctgccttcattctcttctgagaggaacacatctgaaagtcaatcagtggacttggtctagagtctgacccagtttaatagatcctgttgctagtagtcaccacagacaccaaagagttgaagaacagattgtggggcctgctttcttgtaggtagaatcattaaaagcctttgccactgctgaagctttaactacaataactagcaaagataaatccagggctctaaatttgaaatattccaactcctttgaaccataactcacacttccttttagttaggtgggttcagcattgcacatccagttatgatatgcttgtaagcaggcattaattcttatggcttgccttggaggaggtaaaagagaagtcattgtacaatttgaaatggacctaaacagtattgtaaactttttttattgctttcttaaaaacacaaaatcatcatcttagcatcctccaaaaagattaagaatagaagttgacttaaaagttagtaatacctctgaaaatcatgattcagaagaaaagaggtaagtctattgaaatagagatttaatttgcctcttttattgttaatttcaggacattcaacttggaaaatgtccatttctaaagcattacgtatagaaaaacactatttgggccaggcatagtggcttacacctgtaatcccagcactttgggaggccgaggcaggtggatcatttgaggtcaggagttccagaccagcccggccaacatggtgaaaccccgtctctactaaaaatacaaaaattagccgggtgtgctggtgggcaccagctactcaggaggctgaggcaggagaatcacttgagccctgtaggtggaggttgcagtgagcagagatggcgccattgcactccagcctgagcgacagagtgagactcagtctcaaaaaaaaaaaaaaaaaaaaagaaaagaaaagaaagaaaaacaccaaaaaacaccatttgttcttgaattcttatccagggtttccactgaggattatttttaacaatcaaaaatgttggtcacttttatttaaaagaatttagtttccaaatacatatgacactttgcttagtgattatatttgcacccattaatagtacctcacaaatgtcattgatactttcagagaaaatctttccaaagaccctcttaagaaagtcctatttctaaaattttcatgtttgattcattcagatatgattaaagcccatcatggtctgtgtaaatgtttctgcattcttagaaactttctccagttttttataactagtccattggatgtaggaatgccaaagagtctaactaaaaagagagggaatcttggctacaatggaatacctaggggtatgggaagtaagtaatagtctttatttccatatgaatattgctggctttacacctgcaataattaggcaagagactcaaagatagttttttcagaaaagttttctttcaaggatctagcaagtctgagctatgcttccaactttactgccctccatcatccggcatctttgactcatccaccaccttctgtccctttcattctcattccccatgtgtcagctccccagaaaggacatatcttgtacaccttgccacagcactcatcacctgcttctggactgcctgagcaagagtgatacttcctgttctaaagacaggagtgaggatgggggatactcagactttgggatgtgccagaactgtggctagtccccaggaagcagaacttggaggactcataaaggagccaatcccacctccatcctaaacaaggccagttcataaaccccatctggcacagcagcagtctcaggaagctaaattggggagtgccctgtatctcactccctaaactggggagtgagagcatcctgatggtcagctcttgggctgtgacagtggtcccctgcaaatgaaaaggggagctgtactgatgtcaggagatgtggctcaccgtcattattagagtcagggcctctcctgcctacttcggtgggtgaggacagagagggggatggagagaatccttaatccttcattggtaacatcctgagatcctcctagagttccagacatcatacttatcatgggatttgtttgccttattttagcctccctgccctctggccagtgagttgaattaaataattgtgccctcagtatcaaggagtagacaatgtagactatttttatgcagccctgaggacccccagtcatgactcttgataaggtgaggcatctgggttgggtgctaaactatgagccttcttcaccctccttccagtaatgcctatttcagccctgcctagcctgcaccatcttgataattaggtaggatgactgcagattgaaatcaagcagctatttcctttggcttttctggcagacactgcccactgcctccagtgcgtgcactgtagatggtgggtggtccctatgggtgggtgctagggggaaaattccacccctgcagtaagcagaagcaggcagaagtctgctggaagctgcaggcctcccgcactgacttgcaatgttccttgtgctccaggtgctgctgtttctttaagaggaaaaggaagaagactgctcagcgccacaagtgaccagtgcctcccaggagtcctcaggccctggggactctgactcaattgtacctgcagctcctgccatttctcattggaagggactcctctttgggggagggtggatatccaaaccaaaaagaagaaaacagatgcccccagaaggggccagtgcgggcagccagggcctagtgggtcattggccatctccgcctgcctaaggctctgagcaggtcccagagctgctgttcctccactgcttgcccatagggctgcctggttgactctccttcccattgtttacagtgaaggtgtcattcacaaaaactcaaggactgctattctccttcttccccttagtttactcctggtttttaccccaccctcaaccctctccagcataaaacytagtgagctaaaggctttgtctgcagaaggagatcaagaggctgggggtaaggccaagaaggtaggaggaaaatggcagacctgggctggagaagaaccttctccgtatcccaggtgtgcctggcagtatggtttcctcttcctctgtgcctgtgcagcattcatcccagctggccttggggttcaggttccttcttccctccctcctgtgaagttacactgtaggacacaagctgtgagcaatctgcagtctactgtccctgtgtgttggcgttcttagcttttttgacaaactcttttctccaggtagtaggacaatgaaaattgttctaagcaaaggaaagaaaactgactttgttgcacttttagtttttttaaaaaaaacaaaaacaaaaacatggcagatgcatattgtgtctggttatattgggggttttacttttacctgttttgagggggatggggccggccaagccattcagagagaacatgggtccagaggacattctcagtggaaagagtttgatctgcagcacccagaagagaagccaaactcggtgtcattctgagtgaacactcaggttggcaagaaaacatacttgaattttcattcatcttctcagcagctgaagaatgtccctaccagagcatcttgacctaatcagcttacagtttgaaaacctagctctccagaacatgagatgagccagccgagccagactgtgaccaggaaacagctcatcccagagaaggagatgcttaacaaaaaaaaattgaaattgtttcccatgctgccagggacttccaactagatagccatgtgacgtcctggtgacttgggggaaaaattagtgatgaaacagccaccaccatattgccattagtggaaaaaaagaggacagtgaacctgccttccacctgccagagggacctcagggtgtggcattatagggccaggaaaagaaaatcggtgtatcctatctgccccaatagctgagctgtagcatttgggctggcctgccttatcagaaaccaagcttatgaagatcttctcccagcaggtccatagcagtaggcttaggatgcagtatatggggccgcatttaaaaggagggaaagattgtttggtgctggaacattccagggaaaaggagactggaatgaaaggtctgaaattatcttctcaattggactccttccagaaaggtggccgtgcctctaagcatgtttttcccagtatgccctaggcctccccccatggtgttttcatatgaggtacyactgtgaaggatctggttcctcattcactgtttgacaagtctttcatgtgtggagttactcttctcatgcccaattttcatttgagtttagtggcttaaccaaacaatgactcctcattccagcggtgacagaagagaaagggtcatttacatcaggaaagaggtcttgtatctgggagtagagagctaaccatggagcacagtggctggtgggtgacttagtctgatggtttgtggaccatagaagtcttcacctctggtttgaggtgcagggctgtcttttgtactggagggtgtggggatattttctgatagttgccatttcttgaaaaattcccttgatgtaccttacacagagcagaaataacattaacatggatcagaggtactgggcttcatctgttccattggaccttggctagggaatatcatttcactggcatcaaacctgcttagcttatgaaaagatggtaatatgtcatttctataaatgtttctatatatgaaacataaagtggcagggagatacaatatcacaccccttccccacaaggactgtgaatattgggatttatgtccttgccattacctagtggttacagccctatcactaaaatttacatcgtttctcagttgggatttgggcattgctaacttactgtatagaaagtttaacttttcctcacccctgtatagaaaatgccttgcctctcaagagagggcagagggggggccaggtgcagtggctcacgcctgtaatcccagcagtttgggaggccaaggcaagtggatcatgtgaggtcaagagttcgagaccagcctggccaacatggtgaaaccccgtctctacaaaaaatacaaaaattagctgggcatggtggcatgctcccgtagtcccagctactcgggaggctgaggcaggagaatcacttgagcctgggaggcagaagttgcagtgagccgagatcgcaccactgcactccagcctgggcaacagagtgagactctgtctaaaaagaaaaaaaaaaaagggcagagggaaatggtgggaatgcctggagcatcctggcactctatactctactgagtgcctctcttcagcccctcaccctgcttccacacacacacacacaaaagcaaaggcactgaccagcttggctgcagggcaagctgccttgcagctggatttgcgactttttttttgtcttaaaatttttactggatcagttgtaggggactgtacttcctaagacactgttctcaccttccaacctcacaaatctcttactagatatttggtttttataacaagggtaaagaatcccaggtccctttagcatgcagagtaatggtgatccctccagagccattggcacttcaaagtggtcccagacctgggagattctggtgggatcttccttaaaaataagcaaaaaacctgagtaccctagatgcaattggccatttgtttcaggcccatcagcgaatcagggctccctcctcaaccctactgctacagttccttagctgtatgcctcagccagatccttggggttagggcatgcactcgctgactgtccccacccatccacttgctctgtagtttctgagctttctccatttcacaagtatggtgcctaacgatctttttctttaggattgatgcagttgtttttcctgaaagctaactcagcatctattcataaaaacccttaatagtatacattaggagttttcccaagctctacagtccctcagacattgcatcctaaacagatttgaggcacacaggccaagactccaccaaggcataaatggtcccccctactcccttttgaccagggtatcacttgtgtctctgcagtaagagttggtcaagttgctctacgcaccttggtgctttccagagatctcactccagactgcccccaagggtggatagagtatcctgacagccagtgtgcactcatgactgccttaattaacattcttctgctattatggagcctgtccagcaataaacagggtctaggaaggtacaagatkagcttccagttaaaatcccattttatattggaatgcatgagctacagatgacagcagagatcctgaggtttctagacatgttgattgtctcttttttctaaatgaactccaagtacttagaaaacagtccctgtccatcagccagaaaaggtgaccatcacccctaaagtaatttccaaacttagttcagtgggaagatatgctggtagtgcatattcagtgttgattttcagtgctagtaaccacttttaatgccagaaatatgtaacaatgataatgtaacgtcaaagtggttactaaagattatagccttaacttttttatgtaaaagataaaatccattcctcctcccagtgagcaagcatggcttgcatttctcaaaaatgagaacttccatggcagccaagaaaacgtcttctcagaggaactttcgtttgatgcatctcccaagcccacatgcctcctgtgttccagccacctcttccatttcacatttaaaccagctctccattcccattgagttgccctaacaacattgtctccagtgtcagaaccatattaaggttcgtttctcagattgggagcctgcaacaccatacagccaacattgcctttgccacgccactgccaccatccccaccattgccctatggtgggcagatgaattccagaaaccctcagggagccaggataattaggcaacccatctgaattggccacgtaagtgacaggcacttatctctcgggttcttgcttttgcagactccagggaagtcctgtctagaggtcgatggcagagactcctagtctttsccatgaggggttgataggaatcaaattgggattcctttggctttgggttttgtttttttgttgttgtttttggttttcagtttgttttttggtgtatggggggtgattttgtttctgaataagaaaaagaagaggcaaccatggcccttatgtgggtttatcctttttgagcaatgttttagccacaagtaaggaatcttgaaagtcttttrtccagcaagcagtcttaaaaatgtttttcctaactccttttgcaggtgactaagtacaaaaaaawagttttctcattgtattcaaaatagtgagtaggttccctggataatacacagtggtagttgacatattttctcaaaacacaaccagaaaacccacttccggtatttgtaaatcacctttcaagggaaaaagtgaacacgtattccttgtatttctagtttgattaccaaacctgatgttacaaagaaacctccgttctgtagacagaatttcttttatttttcttcttttactcctcacaatcactttcccagtgccatcaccatctataaggtctcagagcagaggattattcatggtaataagtgggggtgtggtgcagccattccagtaacacccacaagaggacagctgttctgaatgtccccacccacccctctttcagtacaggtgagacattttcagttcatgagctccagaccaaatcccaggccagcccttgcaccaaaagccttttttagaaggcttatcagtctattaggaatgtctcaggaaagatgagccatttctttggggagaaatatatttacagatggaagtgtgtgactgcgtgtctgtgtgtgtgtgtggtgtgtgtgcgcacgtgagtgcgtgtgttcatctatgtgcatttcacttccataaagacccagcccaagctgctgggaaccatgtgttcctgagtattctcagaggttaaacaagtgacaagtgagcttctgaaattagtgtctcagcaagctggctttaggaatgagccccattttatcaagcagagaaaaaaaataacagcagaaaagataaagataaaccaaaaatatataccccccaatggaaaataatgttgattcagcaattcccataggatgtattacatgctctaatttattatattattatttatctgtctttgatctttgcccattgtactcttaaaaagatgktgggatgttgattgcgatttttaaacaactagataatgtataaatcagcagtggaaatcagttttaatgtgtggawgtgtctgattattgttaaatgcctctttttttactttttttttttttaratgtataatgtttcataaaccctggcactggtcacaaagctcagctgtgaaaatgaaatttgtagtatttttaaacatgaatgtcaatttcaagtgtatttgaaatggttcctccaggagagatatttgtgcaccattaggaaaatcttctctgcagaggaagtagccttctttggagaaaatggaaaatgggttctgatatgtgatctcagagtagcccatttcctagggcaccatggaaaacacaaatgtgatctttaagtatacctcttccccagtttggggaggaaaggactcagtttgcaccctttttgtatgtaaaataaaatgtcttacctttcttggctacttctgcttgtttggttggttgattggtttgtctgtttttaatctccctcggctcatttgtaattaacaatctagctaggactaactttgatgcgattcaagactcctgtgaacaaaaataatttggcattcttgtttcattccttggattaaatattgtcttctcctgtgagtcacttcaaaaataaatactgctgtctctcttcgagtgctgaagaagaaaattattttttaattaaaaaaataaatattggccaggcgcagtggctctcacctgtaatcccagcaactccgggaggccaaggcgggtggatcatttgaggtcaggagttcgaggccagcctggccaacatggtgaaaccctgtcactactaaaaatacaaaattagttgggcgtggtggtgcacacctgtaatcccagctactcaggaggctgaggcaggccaattgcttgaatccaggaggtggagtttgcaatgagccaagatcgcaccactgtactccagcatggacgtcagagcaagactccgtctcaaataaataaatattcctggaagaatttggacattatcactcatacgttagttcctgggtccctgttgttctcaggtggtagaacacaggaaatcaggatctgctctgtggaacaactttagtagctttataattctcctctacaaatgcggaatatgtgtccagacagaagatagaactatgatgagcaatgtaaaaccatactgcatatgtagccaacagaacaactgtcaatctgggcatgattgactccttccagtttgttactactctttaattactttttcacaggcaggtagcagtggaagaatcatgagagaaaagtttcacattgagagcattttatccatcaacctgatttcttttgaaagtgggagtgggagaaaggctgctgtgatgccattttagccttagctcctcatgtgcaggaggctacttgggttttttgagtgtttctttgtttttgagacagggtggagtgcagtttcacgatcacagtacactgcagccttgaccttctgggctcaggtgattcccccacctcagcctctggggtagctgcgactacagatgcgcaccaccacgccctgctaatttttgtattttttgtagagacaggtttcaccatgttgcccaggctcaaactcctggactcaagtcatctgcctgccacagcctctcaaagtgctgggattacaggtatgagctactgtgcccagctggaggctactttgaaaacatgatttagtaaacatttttctctggctatggcagcctgagaccagtgagtgaagaaagaggcttaacaaaataggagaaaaaaaaaaaaaagggatgagagatggatctggaagatcatctttgtcagtataacaatgtttaaaacttcctcctgattggggttgtctgaattgaggtgcaaggatgggaaataagagaactgtcttgaagctctacaacctgtgtaaggccgctgtaatgaacaacaaagttaatgccagtggccttgcataacttcagtctcaggtcagcgcctcatgaagactacattgcataatttatgtaaatggagccctgcctataatctgtgctgtgacgacctggaatttctacgaagttaatcgttgaaaattagttttaaagacgttttaacgccataggtccaaattttggaagtttgtgttttggtttgttttggtgtgtaagactcccagtaccaaagtatctatgttgtagagtgggacaacactaagtgtgtgaagacctaaaatagccctgtggggacatctagtaactattcctgacctccggaaaaaggcattgtatcctcaggccgtggcataaattatttctcatgtcagtgcggatgtgaagctatcccaaccaggacttgttgggcactcagtactgccgcgctgtgagggagctgtggacagagtaaatgcaacacagtcccttccgcagaaaaaaaaaaaaatgtagtctattgggggaaaaggtaaaggaagttaagaacagcgtatacaataagatgtccattgatatacacaacagtaagcacagcaagattacagaagggagagaaaaatgggtagtaacttgacggcctcagtaaaaaaggaagtgggttgtgcagcaagttttgcaagacaagtggaggagccgtacaaggccacgctcggtaaggataaatgtccctgaagtgtttggaagccacaacgtttagagccaatttggcggtgacaaacacttgactggcccaaaacagtgacaagcttcccgtgccccttgtccaggcccacgtatttgctaacctcaagcgccagctaccgcaggccagtggaacagcgctccgggcggggcgggccgcggagcatgccggggcttgtggtcttctcggagcccgggcccgtgctctgcgaggccgccttccgccggtggccttcctgtgggcgggagagggcggccgggagcccaatgagggagcaataacgtggcaaccacccacgagcccgcgtcggtgcccgccccgcagggggacctactatccggcgccgagccggaggggggaaacggcgcccgccgcccgcccggagcccgcgagcaaccccagtcccccccacccgcgcgtggcggcgccggctccctagccaccgcggccccaccctcttccggcctcagctgtccgggctgctttcgcctccgcctgtggatgctgcgcctctccgaacgcaacatgaaggtgctccttgccgccgccctcatcgcggggtccgtcttcttcctgctgctgccgggaccttctgcggccgatgagaagaagaaggggcccaaagtcaccgtcaaggtccggtggagtccgcggcatttacggtgccggagctcgggcccgggcggccttggcttggccttggctcagcccctcctccctcggcttctgtctgtggcctcgtggcgtctgggccgtcctgcccattcagtccagggaacgacccggacccaccccgacacccccagcccctgccctgacccagggagttagttggatccccggatacccatctggggccgacactggcagtctcagagcaggctttttgcaaacacccctcagtgctggggagatggtgaaagatcacgcctgccggattccgaatcctttctctccttaagccaaattttagccacttccaattacaaagcacagtatgtatacttcaaacttaagtggtgaacttaggctccgctccttatgggttttctaatgttaatttttagaatctgggtccattagctgtttagagcaaatattgttatcctgtagtccaaggagggtatagataagcatgttttccaagaaaagggtctggagctttcattagattctcataggatttttaccgtcaccaaaatcagattcagaaccacttctctaaaaatatggctctattctctctcccatcctcaggttagcttcttgtaccttccctcccctagcaacgcccctttaaagaagctaagttggaaatggtctctttcctcaggtgtattttgacctacgaattggagatgaagatgtaggccgggtgatctttggtctcttcggaaagactgttccaaaaacagtggataattttgtggccttagctacaggagaggtaagtggctggagcaggggtagtcaactcacatgaagtgaaattggcactggggatggcagcaaactgacctgcagagttcagccgatctgtagcgtggacctcactgagcaccgactgcctgttgccctgggaacacagtattgccctttcttaagagtaatggggccctgaccaggcacagtggctcacacttaaaatcccagcacttttggaggccaaagtaggaggattgcttgagcccaggagttcaaggccaacctgagcaacatagcaagaccctgtctctacccccgcaaatttttttttttttttgagacggagtttcactcttgtcgcctgggctggagtgcagtggtgcggcctcagctcactgcaacctccgcctcccgggtttaagtgattctcctgcctcagcctcctgagtagctgggattacaggcatgcgccaccacgcttggctaattttgtatttttagtagtgacagggtttcaccatgttggccaggctgaactcgaactcctgacctctggtgatccgcctgccttggcctcccaaagtgctgggattagaggtgtgagccactatgcccggccaaaaaaaattttttttaattagctgggtgtgacggggtgcacctgtggtcccagctacagctactcaggaggctgaagtgaaatggaggttgcagtgagccatgttcatgccactgcactccagcctgagcaatagagtgagaccctgtctcaaaaaaaaaataaattaattaaaaataaaaggccgggcgcagtaactcatgcctgtagtcccagcactttgggaggctgaggcgggtagatcacctgaggtcaggagttcgagaccagcctggccaacatggcgaaatcctgtctctactaaaaatacaaaaaattagccaggtgtagtggtaggcgcctgtaattccagctacttgggaggctgaggcaggagaatttgttgaacccaggaggtggaggttgcagtgagccgagattgccccactgcactctagcctgggcaacaagagggaaactccatctcaaaaataaaaataaaaaataaaaaaacaggctgggcatggtggctcacacctgtaatcccagcactttgggaggcggaggagggcagatcatgtgagtttaggagtttgagagcagcctgggcaccatggtgaaaccccatctctactaaaaatacagaaatcagctgggcattgtggtggcacatgcctgtaatcccagctactcaggaggctgaggctggagaatcgcttgaacctgggaggtggaggctgcagtgagcggagattgtgccattgcactccagcctgggtgacaagagagaaactctgtctcaaaaaaataataataaaatttaaaaaatgagataaaaaagagtaaggggtccagagcttcctggggagacttcacctagggtgagggcagtgggttttaaggaaacaacagtgccctatttcagtttatattaactttccattgagccagcaggtgacctttcttctcagttttcttgtatctgttcttatgattggaagaaatgaggggaaaagcattatgtgatgtagaattgtataaagcttgggaattgtatggaggcagagggatttccacatctgtgtgtaccatgcctgtcctgtggcgcctgcccgctcacttagtagcacactgaacagtgaaagtggtcagcagtggtgtctcttctgcgagcaggagttgtggacttgttcctgtgaggcctatttaatgtaatgtcttcctgctgccccataccacctccttaccttctcttccctttttctagaaaggatttggctacaaaaacagcaaattccatcgtgtaatcaaggacttcatgatccagggcggagacttcaccaggggagatggcacaggaggtaaccacaggtcctctgggccaaggagtatgtcagtgtagcctccacagtgggagggccaggttctgctggggagaccaggcctctttcttccccagctctagaggcaggcctacttattacttacctactttgagaccagcggcacccttctttgaagagggaacccagtacaaaggagagagaataatggggtggacctgatggtagatctaagagaatctctcccaggtgaccgtcctgctgatccaggcctatagcctggtgacctttcctgatacctcttcagaatggggattggggagagaggcgtgtggaagcaaagtgaagacatgtgggtacgcgattctaggtcagatgcccaaa

SEQ ID NO: 97091 - DNA, 20973 bp, Homo sapiens
attctcaggcttatctccacactgtaatggtagtgattgtggatattcatctagcatggaagggagtgaaacaggttctcgggagggttcggatgttgcctgcactgaaggcatttgtaatcatgatgaacacggtaggctcacattaagtttcccagttatttctactacatggctgacttaagaacataaataagaaggattattgatttctgcaggtgatgactcttgtgttcatcactgtgaagacaaagaggatgatggtgatagttgtgttgaatgttgggcaaattctgaagagaacgacacaaaaggaaaaaataaaaagaagaagaagaaaagcaagatactgaaatgtgatgaacatgtaagtgtcataacttgtaattcttaaacctttgctgttgaggacagaacacgtgttttccttggagtggcatatgtgcagcttagctgctaggatttactttttttagaatgagttctttatgcagttccattgggtgctcatcgtgtgagagtgtgggttgggggcagagagagatgtgatcatttgtgcaacagtccttgtgagtcagaaattcaattgttctttttatacttttaaaattataagctgtgtaatcttaaacaatttgtttagtccctatcatattaggttctatgaaggtgaagtgaatgtatattggcaggtgtggcatagtgtctagtacatagtaagtgcctggtaaaataaaatgaatgccagctgctactattacttagtattccttctaaaggtttaatactatgtcaggatttttttgagatggagtctcactctgtcgcctatactagagtacagtggcataatcttggctcactgcaacctctgcctcccaggttcaaacaattctcctgcctcagcttcctgagtagctgggattacaggcgcatgccaccatggctggctaatttttgcatttttagtagagatggcatttgaccatgttggccaggctggtcttgaacacttgacctcaggtgatccacctgcctcggcctcccaaaatgttgagattgtaggcatgagccaccgtgccccgcttttttttttttttttttaaagaataattgctattatatcatgcctttttacctgtgaaatcctttgctgtggtatcagatccagaagcttggaagctgtattacagatccaggtaatcgagagacctcaggaaataccatgcacacagtgtttcaccgtgacaagaccaaagatacacatcctgaaagctgttgcagctctgaaaagggtgggcagccattgccttggtttgagcataggaaaaatgtaccacagtttgcagaacctacagaaacgttgtttggtcccgattccggaaaaggtgccaagagcttagttgaactccttgtaagtattccatgtggtcttactgtacataactgtttgggaacggggtggatgtgggaggggatagtatttgagggcttaaggtaggtagttgaaggaagcttatgagaaattaagggtagtatttcattattgtttggggacttcatttctgtccttccactcgtggtttatgcaactactctggaacacgtttccatggccgcctctgtctcagtagaagacattataggtattccttgagttacagtggggttacattccaataaacccattataactcaaaaatactgcgagttgaaaatacattcaacatcccaataaaccctttgtaaagttaaaaaaaaaaaatcccaaataaggctgggtgcagtggctcatgcttgtaatcccagcactttgggagaccgaggtgggtggatcatgaggtcaagagatcaagaccatcctggccaatatgatgaaaccccgtctctactaaaaatacaaaaattagctgggcatggtggcgtgtgccagtagtcccagctacccgggaggctaaggcaggagaatcacttgaagccaggaggcggaggtttcagtgagctgagatcgtgccactgcagtccagcctggcgacagagtgagactttgtctcaaaaaaaacctgagtagaaccattgaccattgttaagtcaggaccatctgtagttaggagaaaggatagaggtagcattgtattcagtagtctgcctccttgaagtaggttactgtaagcaaactttgcctttctgattggcaagttatggtagccacccttccataccagaaagaatatacaatttgaactagaggttgctttcttcttttaggtgtcatgtagggtaagactccagtcctgagactttttacctgatccccaactgacccagtgcgtagtataggtggcccttggaggaggggaggaagaagagtggtgtccttttcattagagtcctgatggaaccaaatccttcggaatactagcttttttctttttcttttttttgaggtggagttttgctctgttgcccaggctggagtgcgatggtgcgatctcggctaatcgcaacctccgcctcccaggttcaagcgattctctggcttcagcctcccgagtagctgggactacaggcttgtgccaccatgcctggctaattttgtatttttagtagagatgggtttctccatgttggtcaggctggtctcgaactcccaacctcaggtgatctgcccacctcagcctcccaaagtgctgggattacaggcgtgagccaccgcgcccagctagtttttttcttttttatggttgtaaagtttagttttaatatttatttattttttttttttgaggagtctcgctctgtcgcccaggctagatagagtgcagtggcacgatcttggctcactgtagcctctgcctccaaggttcaagtgattctcctgcctcagcctcccaaaatgctgggattacaggtgtgagccaccacctgtataagtttaatgtttaaaagttttaatggttgtaaaagtttacttcttaagtagaaaatggttatcttttacttagtttgtagagatgactgtttcaagataggactaactggagatacgtctggctacttaaaatatggtaactagttgtaacatctttaattagttattttttcaaggccaaggtatggtggtagtttgctaggctcataggcttctaggagaaattatagattcaaggtttcaactcaaggagttggattttattctcactactttcttaggcagaatgacatgatgcttattctgcaaacactccaattaaaggctttatgtgactgatgtgaaactaaaaagttagactggtttaatttttagctgtcctcctccattacataacattttgcattcttaagtcatagtcttaactactgctttaatttgcaggatgagtctgaatgtacttcagatgaggaaatctttatctcacaagatgaaatacagtcatttatggctaataaccagtctttctacagcaatagagaacaataccgacagcatctgaaggagaaatttaataaatactgccggttaaatgatcacaagaggcccatttgtagtggctggttgacaacggctggagcaaattaaataaataaaatagctctgtctttcaatgaaacactcacgatgactactgcgccttctctttcgaaaaactcttaatttagtgacttatggcaaaattttatcttaaatcaatgtgattctttcttgttttgggagacggtggaggtatcctcattagttctttcttcaggcttgtgtctttagttgcgtggctgcgcaggcctgccatatgatttaagccatctcttttcattaaatgtttctcttcctgtgagacttactaaagcaacttagtggcaaaaagtaatgttgtacttataattctgtacagaaatgacaatgagctgaatatatggttttacaaagtagacatccacttgcaaaatgtttggatgtaatgttaaagcgcaatgtgcaaaatttaaaataaagaatatttattaatacgcacagtaaaatttgctgtacatgtttctacttaatatgtggcagtactttagtatttgccacttgtggacttgatgcttggccagtgttgatgttagaaaggatgaaggacagagatacagattgttgaagacaaaaatcttcctttgatgagaattgacaactgagaaaagcagttttccagtctttttcttttgaggagatactttaaatacttgctaccatcttactttcccatgagactttaattgctattattaaaggttccctaatacataatacaaagtacttcttaaattcagaggttcatattgacctagaagaataaaaacaaaacttggcagaatttcaaccaagggttgcccgataagtaattgctcaacatgtaagactgggctcagaaggctgcactgagagctaaccacattgtgggctgtttaaatgcatgtgaggttcagccttatctggtatccagtaacaaagtcactgtggtcttacagtttactcctgtcacagctgtgagtactaaaggagagagttccccccaggagtagcattttgctgccatttaaaagatccagtcaaatagctccgtagacacatgatgcttagagatttgtgtctacatgtttataatacttggtggcagcataaaatcatgggacaatcagtacttctgtgcaatggaggtggagtgaattttatgtgcttttaatcagattttgagttagatttcaagtgggcagcagcagaaacttagattgaattttcatagtgccatttcttggatccacctcctgagttgtctttcaaatctaaatgttgtataggaatggggcagaggtaaaaggactcctcttggaccctttttgatttcatcccagaatctaaaaaatgactgtgggtctcccacagcccttggctcagaggtgaatcccctcttcaccactgttaagagtcaaatgttcttttgagatccctaaaaggaaaggctgatttagtttagttttaatctttgccattggggccaaacacaggataggcaaatgagtgtttttgaatgaataaaccagccacattcaccgcttactccattgcttgctggaagggagtcaggtggttattcaaagatgctttttctttaagagaatggctatattaagtacgcagttttcagcacttttagtaaagcgagctctactctgaacaaaaccagcaacccgagaagcgataatgatgtgaagacagttgaggagcacatccctggcgtaagactggactgcctgtggtccaaaccatgcttcaccacgtcagtatactcatctttaaaattaagatactaatatgtgccatctcagcgcggttgtgtagattagttactatatttaaaatgcctgctacaccataagcagcaaatgttagatactgttttaatctttggcatatatcatgatacatttgctacagtggggtaggggtaagcgtgggggtctagggcagttagacacagtgggccatttagggacagaataccccagtacacgtgtacttaggagtatttcagttctccgtggctagtaaagccaagggatcaggtagggtgaatgagtccttcccaaggtcacctagcattgatggcggagacactcggcgttttctgggccgaatcccttcccatcagccaccggcgggtttgggagggtgtggaagagtgttggagtcaccttaagtgcccttaattcctcatcctggcattagggttcaggagtagagaagggagactaagcgggacgcttcagtatgcgcccttggggctgaaggaacctccccgctaaacctcggtttccctgaccccaaagggcagcgctcactggggaagcggcgccgccagctgccaggacgctcccgcgcagcccggtttccctacgccggggcggggcagaggggcggaaggggcggggcggccgggccgcggcggcctccgactggatacggcggatcgccgggggcctgagggtggagtcccggccggaggcaggccgggactctggtgggtctaggcgcggatcggacccaagcaggtcggcggcggcggcaggagagcggccgggcgtcagctcctcgacccccgtgtcgggctagtccagcgaggcggacgggcggcgtgggcccatggccaggcccggcatggagcggtggcgcgaccggctggcgctggtgacgggggcctcggggggcatcggcgcggccgtggcccgggccctggtccagcagggactgaaggtggtgggctgcgcccgcactgtgggcaacatcgaggtgaggccgggccgagggcggggacgtcgcgggcgggtcgtttccccggagtcgggttcacctgcccgccacgccggggccctttgctctagtcggggcggcctctcggatcccttaaggcaggcttctcccttccccttaagtctcatctttgaaggagccgtttgccctgacagcccctgctcgagttaccgaatctccgaccccggcatctccccacccgcccctcgggtctccccagggtattggcccgaggaaggggaagccggaggtcgggggtggtggtctcgcccctgtggccttctcgcccccggcggccaagtgcctctaatctccagaagtcacccaccacgcagggcaaggtggctggccaaccagatgggcaggagccaggactgaggttggggttggggtgggagctttactgaagagcctcagccccgccccctcacctcgggggtaactcatgcccagtggcatgaggaatgaatggaatattcattagtgggccctcctccactctcctggggcgaacagagtgggtgaaatcgggcggaaaccttgagaggataaagcaacctggaactccttactctgctcttgacgtggggttgggagccctcagagctcagagaaaaatcaagatggccattttggagcagggaggaatttctgtgctaggctctctctggatgtgccctgtaagctcattctcagtgtcgggctagtgcttagctgcagggctttatctccaccgtgctcaaagtcctcaggyagggaaagggtaaggaggccttgggtgggggcagagggagaaggtatacaggaaggaggactgtcccctcccctgctgctgaccaaaggtatgctttataacccagataatcccaaggtcacctggctccatcactgccccactctttcctccctttatcctattctgaggagctcaggacccagccccagccttggagcccagaggatcaggccagggattaaacaactggattcygtaattctgaagccactcttgccttctcacctactcccctaccgcaagctagccaggaagggggggcctgagccccaaggggatccccaggctgatcactcagtcccagggtgactccatgtctgagaggagaatgcccctgttgtgagggggtgacatgatgttgtagatcattactgaggggaggtagggagatcaggtggcacaggtggggcaacaggaaggcagtgacagggagaaatacattctgagctcatcccttctggttttcttgtggcaggaattttgagtctagaggaggaagcgggaagatgtacaccaggggaggggaaagctgcagtcttccttgcccacagtctgctttgattgattcagtcattgatgttaaagcagaatttgggttctagcttcctacagagaaaactcctgtttcctgaagtgatcaaatgtgggtaaaatctggtgaaggggggtttctgattctcagaggactataccttttgaactcacagaaagtcaaagcagaaaagaatgtcccaagacacccgatcctgtcctttattcctggctcagcttgggaggaggaaggggctccaggccagggcagctggccaagctggccttcctctagggcaccgcaygccccttccccctcgcccacgtctacacagtcaccatcacaaggctcaagtgcccagtcactggcttccaaagaaggccacagaacgtattttcttcttgcctctgaatgtcagcttccccctgggctgcctctcagtggctctgccttctcaggtctttcttggcatgctgagggcctggagatgcacagggggtgttcaatggcacctgccacctgaattgcctcatagtctcctgagaaacctcagaggggagggtggtgcaccagggctcagagagaaagaatctgtcctgactttctgacccctcctttaggtagggagagaagattggcagctgggcttggttgaaaggcatgtctgagaactctgagccagttggctgcagtttgcgaggggaggggaatagttcagagatgagggactggctgacacaatgcagaagaagctgggttaaccagcccagtgactctcgggactggtgtagaagcatgaagtggtggagaggcgcatattacctatgggcagaagaggtgttcctgttgaggaagaggcagaaaagagagagcactccattctctaggtccctggcccctgytccacccaggacttgagtttatttatttatttatttatttatttgagacacagtcttgctctgtcacccaggctggagtgcagtggcgtgatctcagctcctgcaacctccgcctcctgggttcaagtgattcttgtgcctcagcctcccaagtagccaccacacccagctaatttttgtattttcagtagagatagggttccaccaagttagccaaggctggtctcaaactcctgacctcaactggtccaccygccttggccttccaaagtgttgggattacaggcatgagccaccacgcccagccaggacttgagtttatagtgaggtttctccattgataacagccttttcccttcatcactcrgggagcactgtcatcccttagactttgaccaaagaggacagacttaggggatgggcagtccaacatcttcgtggctgaaagtcagctgccaaaggagcatgttttatgagtgtgacgggggtyggggtctgaggctggctagggagccgtgggagtsagctgctcaccccagtcagacccctgttgggtttcataggagctggctgctgaatgtaagagtgcaggctaccccgggactttgatcccctacagatgtgacctatcaaatgaagaggacatcctctccatgttctcagctatccgttctcagcacagcggtgtagacatctgcatcaacaatgctggcttggcccggcctgacaccctgctctcaggcagcaccagtggttggaaggacatgttcaatgtaagagctccaagcctccatcttccaggtggagggtggggaggagagaggggagccaggggtttgtgaaccagagtgctgctggggacgggacatctaggaagagggagcttcgggttcccacctggggcatcttgactctctcttggcttcttgccctaccagagggatagagagtggatgaatggccatatcagctcttctcttctttgagcccctggaggtagttctttttttttttttttttttttttttttgagatagagtcttgctttgtcacccaggctggagtgcagtggcatgatctctgctcactgcaacttccgcttcccaggttcaaacgattctcctgcttgagcctcctgagtagctggaattacaggcacccatcatcaatgcccatctaatttttttgtatttttagtagagacagggtttcaccttgttggccaggctggtctcaaactcctgatctcaggtgatctgcccatgttggcctcccaacgtgctgggattacaggcatgagccaccacgcccgacctgaaggtagttcttaaagtctagagtgatttccttgtgttagaagaaagattgttaggggagagaactgctgcctgttgaatgtttcccacttgtcagtcctgtgcctgggtgcttgggaacgtgatgttatgggaagaaaaggaagagagagacaagtgatgatattcttacctagcctcactagtaactatgtgactttaggcaggttggttaccttccttgagcttcagtcttgtcacaattaattgggatgaacacacctctatcatcaatatctggggtcacagctccaatgtcccctggggccaggtaggtacataaaggagtgagggaggttaggaggggtctgtggtgtgtgaggaagcacacagccactgctcaaatcctgcatagttgctctatggtggtgtgggcccagtgtggcctgatttgatgaaattttttttttttttgaggcgaagtcttgctctgtagttaccaggctggagtgcagtggcgtgatcttggctcactgcaacctccgccttctgggttcaagctattctcctgcctcagcctcctgagtagctgggactacaggcgggcaccaccatgcccagctaattttttttgtatttagtagagatggggtttcaycatgttggccaggatggtctgtatcgcctaacctcgtgatccgcctgccttggtctcccagagtgctgggattacaggtgtgagccaccacgcccagctgatcttatgatttctttgagagaagtggggagtctgattttatgtgacacccccccactcccattcactaaaatgwcagctccatgagggcaagtattttatctgttttattctctggtatggcttgatcccataagcactgaaaagatagttattgaataaatgaaactttccagtacatgttggaagggtttttaaaatgttttgaaactgtgcacaggccaaacccaactttcaggacatgggttttcaacttctggatggtatgatggggtgatagtagggtataaaagtatcctgagaagttgaaagcagtgtgtgaatggggtgttcttttctccccacaatcctttcccatctgctgacagtagacttagcacctcacagatgcttgggcctggaaatgaagccatgaaaatgaagccctcagccttcttggagatcagagccatggtcctcacccacagcacatgggtctctaaacctggacctcaactcgcccatctgtaaaatgagggacttacattaaattcctacagctcctttcagcttgaacattatctgagtctattaggatcatcctatgaggcatcttctctttccctgcccctgataccctagacctgggagatttactcacctggtcccaggggatctatttctcccactctacctgccaggggctgagttctctgcctcacaagcccacattgccaagaagatgagaaacacggctggaaacctccctgtcctggcacccatctcttcctactgccatgaacaccaagacaggttcacaccaaaggtgttctgttcctcatggcaggctctgccacctgattaagagaaacatctaatctcctgctggttccctctcttcttaagaggagaggcctgaggacctgctgaaagctttatctctgcttgtcctccgggtgaggctaatgagtggggccaacgggtggggcagtgtaggcgctttacagcagacacgccttcagacctctgttccctgaagggtggggatgtgggggtcacctctgccagagggagtaggagtggcaagttacctgaccctctagagtctccgtgcctagtcttgtagatggaacccacgttaaaggaaggcatagaaaggagggtcaggccttctcttctccactcatctcaagggaggggatggggaaggagcagagagtagctgaggaaggtagggagaggctaggctgtgtgccggaggagagagatttgtaagccattttggtaaggattttgagcagtttaggagggagcagggccagagactgtcacagagaagagaagagtagggtatttgggggaagaaatggaaatgattccctatggaattagagggtctgtgctactgttcatagaggagatggccaagacagagtctcctgggtcaggagtgggtttgaagggtttccattcttgtttgcaggaacttggggggtcagccaggtgaggagctacctctgttatcaactgggggttgcggctttagggagaggggcatctcgtgtagaagacaagatgctctgtgcctgtggctggtctccggggggacctggacactgttttggaatgccacactgcccccttcccccctagcattctgtggctccatcacttgctcagttgggccggagtggagacacctcattgccctccctggcctgcaggtgaacgtgctggccctcagcatctgcacacgggaagcctaccagtccatgaaggagcggaatgtggacgatgggcacatcattaacatcaataggtgagggcaggtggccaatgggtaccactcacccaccaggctgggtaatgtgctgcagctcacctgacctctttggacctcagtttccttggtgggaaaatacagatttaatacctgaatggcacaattatggtgagggaaagaataatgttgtcaagtaccagcccctggttggctggaatgggcagcttagccccttccctctacagctgaagcctggggcctctcctgggactaagtgcctcgattcctcaggcctggggatgaaccccacctcatggcacaaagagtactatgtacagtgtctgccactggggagccccagtctgaggggggacatggcctctrcctgccttgagatgtcccaatagaaccgtatcagtgaacatacagattagatggagagaattctgacattctgcaccaccaggagagtgcattctgtcgtcagcttagggatgagttccaggaaaaggagggttttccaaagctgtttgaataaccaaaattagattagtgagctgtaggatggccagtagaggtcccctttagaagtcttcccgatgggcatctgggtggtggggctgaccgggtacggcaggagcaccactggtctccctggaacttcattctctcctctttccccttcctctccccacccagcatgtctggccaccgagtgttacccctgtctgtgacccacttctatagtgccaccaagtatgccgtcactgcgctgacagagggactgaggcaagagcttcgggaggcccagacccacatccgagccacggtgaggctgtggcctagccctggtgggcacagggtggcgcaggccctccccacccacacacaccgttcaggaagcccatgttcagaatgtgccgctcagagctcctgggagtggactgggcacagaactgggtgctgctgctccaggcatggccctatgcagcccttcatttcctcatttcactgatccaggagccaacgaccagacttagactttgagctgggagggggctgacctgagggaaagcaagggactgtgggaaaccaggtgcacagtggctggaaaccgggactctgggctcttctcttgaaggccgcatgatcgtgagcgagtcactgaacctccctaagcctcggccttctcacttgtgaaaaggagatgatgagcttttcagggacacttttttgtaaaacgtttacctgacatataggaaaggctctgtagatggtaggtatcattgtggtcactgccagtggcagcttcggagggaggaggccgctgccggatatcaggcagccatcactgtgaagctggggttctgtggcctccatcctctcccctcgacctccccaagacctggcaaagctcagcccctgagaaggccctctctgttggcccagtgcatctctccaggtgtggtggagacacaattcgccttcaaactccacgacaaggaccctgagaaggcagctgccacctatgagcaaatgaaggtggggcctccctctgagcctggtgaagccactgactccctaaatgaaggcagagggaagctcggccttcagactccactcttccagcctttgtggctcctcctggagggttggggtggatgtgtggatgccacagagaagctcagtggtgggagggaatttgagtccattctgtccttgtctcaacccattcccctggtgctctcagtgtctcaaacccgaggatgtggccgaggctgttatctacgtcctcagcacccccgcacacatccaggtgagtctggccctgactgtctactcactggaggaacccaaccagccccagaggaggggagcagggagccctgcagggccaggggagagtgtcacagctgcctcatgccttgtaccttccacagattggagacatccagatgaggcccacggagcaggtgacctagtgactgtgggagctcctccttccctccccacccttcatggcttgcctcctgcctctggattttaggtgttgatttctggatcacgggataccacttcctgtccacaccccgaccaggggctagaaaatttgtttgagatttttatatcatcttgtcaaattgcttcagttgtaaatgtgaaaaatgggctggggaaaggaggtggtgtccctaattgttttacttgttaacttgttcttgtgcccctgggcacttggcctttgtctgctctcagtgtcttccctttgacatgggaaaggagttgtggccaaaatccccatcttcttgcacctcaacgtctgtggctcagggctggggtggcagagggaggccttcaccttatatctgtgttgttatccagggctccagacttcctcctctgcctgccccactgcaccctctcccccttatctatctccttctcggctccccagcccagtcttggcttcttgtcccctcctggggtcatccctccactctgactctgactatggcagcagaacaccagggcctggcccagtggatttcatggtgatcattaaaaaagaaaaatcgcaaccaatctgccttggcttcaggagtgtctttccattctttccccttctctgtgatcaggggtgcttgtgtctcagaatttcttccaggtaggtcccaggtgggtggattgggggcctcactcatgggagtatggattaccttaggtagcaggaatgggtttgtttgggccttgaaaacatgtaggagtttgacaaagcgaagacaggtgtgcaaggctgagaggtctggaagagcatgcagtgctgtgcgaacagctcagaacttaagcacaggagcaaggagccagatggggctgaagaggcagctccttcctgccttcctggatcgctggggggctgagtgctgcgcaagagtctcgccattacctgtgggacgggggcgttagtgagcttgtcagcaggaacacgacaggctcagagtcacttaggaagagaatcagcggcccgggataggaagtgactgttggggtcctgctggctggtgatgggctagtgagaagttctgggaaaaatcaccagcgccgggatgtggggagggaggcaacaagactgaattggttgaccaggaaggccaacccatctccttaaagggcccttcactggtgcgtgggtgaatgcggtccccggcctcctgggacctcgaggaacacaggacgcagccggtagtacggccagctcagctcgccgctcctctagccttgagggaggcgctgtgggggacagcctggcagccacgcatgcgcaaaacaccgtcaggaaggggccggggaggggcgggctcccgaacccggaagcgagggacccacgtgggagcctgggagcgggtggtcgtagctcggtagtccagttgtgggtaatcggggctgtttgttcctgtccgagagagctcggcggagacggctgtcgagtacccttcacctcggtgttgggagcctgggagcgaactgcggcgcgggttaccgctcccggggacgcagcaaggggcatcgagtccctggcgggagctgcgccatggcattgctctcgaccgtccggggcgcgacctggggtcgcctcgtcacccgtcatttctcccatgcagcgcggcatggggagcggcctggtggggaggagctaagccgcttgctgctggatgacctggtgccgacctctcggctggagcttctgtttggcatgaccccgtgtctcctggctctgcaggccgcccgccgctctgtggcccggctcctgctccaggcgggtaaagctgggctgcaggggaagcgggccgagctgctccggatggccgaggcgcgggacattccagttctgcggcccagacggcagaaactggacacaatgtgccgctaccaggtccaccagggtgtctgcatggaggtgagcccgctgcggccccggccttggagagaggccggggaggcgagcccaggcgacgacccccagcagttgtggctcgtcctcgatgggatccaggatccccggaattttggggctgtgctgcgttccgcacacttcctcggagtggataaggtcatcaccagccggagaaacaggcacggacgtccctcattctctatgtgccccaacttggagacgcagccgagttcctaagcaccttggcccttgggtgatcccttagccagacttacctgtcccagaactctcatccccctagcccttgggagccctgggagggtagggagccgggcttgagatggcccagcctaatgcggggaacggggaaaccttgcagctgcccgctcactccagtagtcagcaagtccagcgcgggggctatggaggtgatggacgtgttctccactgatgacctcaccggatttttacaggtaatgaggggcaagaggggaaggaacagatgtgagcccagctcagcctcttcaaggggacgaagctagcccctggcgagggagagaaaggggcatgttggcaccgcttcctttggccttctaaatccctctggggatggaagggtcctggagtttttaaaacggcaaatggagcattagctgaattcttcctagcgttataccctttcctgcaccccttccccaggtatgcaccactttgcctcttctgtaagtcagcctcagtgtctatttgcctactaggtcgggcttcagtaaatgcattttgttcagctgtggggagctgcgtacaggagacctgagttcctcgaatagggcacagcttgaaaggatgtttgaacaagaagatctttatgccattagtatctagcaagagacaaaccttggaaacccctctcccatccgtttgtcttcagctgtgcttcccttgctggacacaaggaggcagtattgctctgcatatggaatcccctctgaccataccccccccaacccccaccccaactgcagggtgagaaatttccctcttaagaagggggagagctctgggacctgtctagaacaacgctgtccaataaaaatatggtgtgagaaacataggtagttttagcttttctagtagccacattgaaaagtaaagagatgacattttaaataaattgtgtccagtatatccaaaataatatcaatttaacatgtaatcattttaattattattaatattattaattttttgagagagtttcattcttattgcccaagctggagtgcagtggtgcaatattggctcactgcaacctctgcctcctgggttcaagtgattctcctgcttcagccttccaagtaactgggattataggcacacaccatgcccagctaattttttttttttgtatttagatggggtttcactatgttggtccggctgttcttgaactcgtgaccttaagcgatccactcgcctcggcctcccaaagtgctgggattataggcatgagccaccgcacctggcctttaaaaaatattattaatgaaatattttacattcctttaaaaaatgttttacatacaacacacctcgatttgaattagccacctttcaattgcttaatagccacatgtagctagtggctactatattgaacagcacatatctagaagcattttttggcttcacttttttgtagagagcccctttctccaagcctgataggagatgaggttcccactcatcacttccagcccctgaacaggtagcttctgaaaacacagaaacactgcagaacatccacttaagctccaggcatcacatctccctactgtcatcagcatctgacctggagagtgtcatccgcctgttgctgtggaagagctggaggtgccccaagcaggggcctgtgctggggccccatcccttcctgcgtactcagagacactgctgtagcaattttcctcctcttcctgcagcatccacttttctcttacactctcttcagcatgcaagcaaacattcccctctcacgctcttgatctcacaccagtcagctcttcctctcacactgaatcaaaggcttcatcaaggtcaccagtggcctccatgttgctgcattccagggtctgttctcaattcttttctgacttgacccatctgcagcagctggcacagttgaccactccttcctccttgaaacactatacctgctttccttctgcttcaccatgtcctctctgagagacatttttagtggttcttcctcaaccccctgacttccgagcattagcatttcccagattttagtcctcggatctcttttgttgttgttgttaagagatggggtcagctgggcacaatggctcacgcatgtaatcccagcactttgggaggctgaggcaggcagatcatgaggtcaggagatcaagaccatcctggctaacacggtgaaacaccatctctactaaaaatacaaaaaattagctgggtgtggtggttcgtgcctgtagtcccagctactcgggaggcggaggtaggagaatcgcttgaacccgggaggtggaggtggtagtgagccgagattgtgccactgcactccagcctgagtgacagagtgacgtgtcaaaaaaaaaaaagagatgaggtcttggccgggagcggttgttaagagatggggtcttggccaggcacggtggctcacgcctataatcctagaactttgggaggctgaggcaggtggatcacctgaggtcaggagttcgagaccaacctggccaaaatggtgaaaccctgtctctactaaaaatacaaaaattacctgggcatggtggcgggcacttgtaatcccagctgctcgggaggctgaggcagaagagttgcttgaatccaggaggcggaggttgcagtgagccgagatcacagcgttgcactccagcctgggcaataagagtgaaactctatctcaaaaaaaaaaaaaagagagagagagagagagagagatggggtcttgctgtgttgcccagcctggagtccagtggcacaatcacagctcagtatagcctccgaattcctgggctcaagccatcctcccacctcagcctcctgagtagttggagatacaggtgcacaccatctcacctaatttttttctttcttttttctttttctttttttttttgtagagatgaggtctcactttgttgcccaggctggtctcaaactcctggcttcaagaagtcctcctgccttagcctcccaaaatgctgggattacaggcgtgagccacctcacctggtcctggatctcttttctgtatatgttcatttcttgttggtctcatctagtctcatggctttaaatactatctgaattcaaattcccgcccaagtgtatactccagcctggaccttggttctgaattccagattcactcatctagttgcctactgcacagttgttgttattgttgttgttgttttgctgtcaggcgggcatttcaaacctaacatttctaaaactgagcgcttgttccttctggagcaactccatccctttggttgtttaggtcaaaaaccttggcatcatccttaactaaagttatttccgtattatcaccatttctgcctgtttccactgctaccactctggcccaagcaagtcaccatcatctgttgaccgttattgcagaaacttcccacctggcctcctttcttctgctcttggctctcagcacagcaggcagagtgattctgttgaagtcataccatgttacttctctgctcaaaacctttcaaagcctctgtaccgctcagattcaaaggcagagtccttccagtagccctggagaccatacctcatgtggctcttgttccttcttctgtcttgacgcctctcttcccactggccaccttactgttctcaaacatgccagggaggcacctgcctctgtgcttgctgatctctctgcctagaatgttcttgccccagatgtctgcacggtgctcctccttctccttcaggtctgcactcaaatgtcacctcagtgagtccatccccacctgcccttccacaaggctgggattttggtctgttttgttttgttcagtgccctgtcctcagtgcctagaacagagcccatgctaggtgcttaataactattgactaattgactggatcagcagataaatgaatgtatgggcaaggctgggctcttccttggccagggctctgatggataattttttttttttttttttgagatgggggtctcactctgtcacccaagcaggagtgcagtggcgcaatcttagctcgctgcaatgtctgcctcctggtctcaagagatcctcgtgtctcctgagtagctgggattacaggctgatttttgtatttttagtagagacagagtttcaccatgatgctcaggctagtcttttttttttttttgagacagagtggagtctcgctttgttgcccaggctggaggcagtggtgtgctctcagctcactgcaacctccgcctcccgggttcaagcgattctcctccctcagactcccaaatagctgggactacaggcatgtgccaccacacccagctaattttttgtgtgtttttagtagagacggag

SEQ ID NO: 97092 - DNA, 83697 bp, Homo sapiens
  misc_feature (1)...(83697): n = A,T,C or G
ttcctgggaatccccagtacctgacactcacaacataccctgttgggaggtggaattcagggacagttcaggcttggatcttgctctcaaggggttccccaatgttctggatgggtggagagagggctcagtgctggagagcctcaagaagtggggagggctttctggaagaggggacatgaatgcggggattcacaggatgtatatgagttcactagatagagactgtctggaaaggtgagctgagcatgctcaggactgggccattgaaaaatcccactaagcgtagacttaagtgggagctcttgtcagctccctgtcctgaggactcttccttgggatcccatagaaggtgggctggtggcttcctgcccgcaaaacactccggggagaggccgcgtgccctttaccctgccatgatggcaccaatgctggcgatgacccactcttctgagttgagacccatgattcccacgctgtggaagcgctccaggcccagctaggggagggaggtcctcgtgaggcactaggaggctcagccatccccgccccacctgcccgggagcctcaggctgagaacctttggctcccttttctctgtcgcctgtttcttctttttctttcttcttcttctttttttttttttttttttttttctgaaacaaggtcttgctctgttgcccaggctggaatgcaatagcgcaatcatggctcactgcagtctcaacctcccccagccccagcaatcctcccgcctcagtcccccaagtagctgggactacaggtgtacaccaccacccctggctaattttttaatttttaatttttttgtagagatgggatctcactatgtcacccaggctggtcttgtactcctgggttcaagcgatccactcgccttggcctcccaaagcactgggattacagacacctctcttgtcctgtttcttctgttgttttctctgataaaataacccatccccctcatgacaagcaaccacactttcatctagaactggggctctcagccagggggtgactctgttcctcaggggacatttggaaatacttggagacatttggggttgtcatagctcggggaatgaaacgccactggcattgatggaaactagatactcacaggacattctccaccacaaagaatgattcggcccctaaggacaacggccctgagattgagaaatcccggaaaaaaaaaaaaaaatacaaacaaaataccttcctgacatttttaagcatgcatactttacagagccagggcaatactacatgtacgttatcaagacctgcctttgttcacaaaaccattcatcttgactgttttccccagtctttaaatatttctctgcaatatcaaatctaacataatatcatctagtatagagatgacatgatttaatcatcccccgtattggctgatacttatgtaggctctggctgctgggtttttttgttgttgttttcactttttttttttttttttaatgagacagggttttggctggacacagtggctcacgcctgtaatcccagcactttgggaagccaaggcgggcgcatcatgaggtcaggagatcaagaccatcctggctaacacggtgaaaccccatctctatgaaaaatacaaaaaattagccgggcgtggtggcaggtgtctgtagtcccagctactcgggaggctgaagcaggagaatggcgtgaacccgggaggcggagcttgcagtgagccgagaccgcgcaccactgcactccagcctgggtgacagagcgtgactccatctcaaaaaaaaaaaagagagacaaggtcttgctctgtcacccaaggctggagtgcaatggtgcgttcatggctcatggcagcctcgacctccttggcttaagcaatcctcctgcctcaggcttctgagtagttgggactacacatgcaccaccacgcccggctaattttcatattttttagagatggcggtctcactatgttgtccaggctggtataagccaccatgcccagcctggtttcacttttattagataaaatgttggggcgaacgccctggtagctcaagctttgcctatgcactgtgattatctgtgccgacatatggatcgacttgacaatttaagatggtgtaactctcttggttccattcactcaggtgagtccatcggatccaggtggagcccctccccaccactccagactcttggatacaactgcccacccctcatttcctcgtctaacacgcatctcaaacccaaacagcccagctaggggagggatgttacccacagccctcatccctaaatctcctccctccactccaacctaccataatctcagacaacagcagctccatccttcaagtggcactgaccagaaaactttggtcattctcagcgggttttgctgagacaccaacaaattctgtgggctctgctttcagaatccgaacgcttctcaccctctctcctgctacatcttggtccaaactatcatcatctcaatctcagctggtctctttcccctcagtctgtcctccccacagtagccagagagcgccgtgagcacctgagtcagggcatatccctcctctgcctccatggctcccactccccctcccctcgggtaaaagccaagtcccccacaaggcccaccaggcacttctcaaccttccccaccccctccctccctcactctgctccagccacaggggcctcctcctcactgctccttcaacacagcaggcactgtcctgcctcagggcctttgcacaaactccccttgacctggaacaccatcccatagatcttttctcttcattgaagtctttgttgaaatatcactttctctcagtgaggctctccttagccacctttttctttctttctttcttttttttttgagacagagtctcactctgttgcccaggctggagtgcagtggcgtgatctcggctcactgcaacctctggctcccgggttcaagtgattcttctgcctcagcctcccaagtagctgggattacaggcatgcactaccatacccagctaatttttgtatttttagtagagacggggtttcaccatattggtgaggctggtctcgaactcctgacctcaagtgatctgccctcctctgcctcccaaagtgctgggattacaggtgtgaggcactgcacctggctagccgccatacttttaaattctgcccccacctcaacagtttactcctttacgtgctttggattcctctgaatcactgaacactgtcttacctattgcataatttacttgtttattacattgacagaacaagtcacaggaggtctcttatcccctttcctgatctgaaaaatgggtgttcattaattcaacaaacatcagagggttggcgctggtacaacaacaaggcaatctggcctctcgccctcaaggaaatgaccaaataaacaaatgaccttggtaacttgtagccatgatgatgaaaactgggaagaatatttttttgtgacagagtcttgctctgtcgcccaggctggagtgcagtggcatgatctcggctcactacaacctccacctcccagtagctgggattacaggtgtgccaccatgcctggctaattttttttgtatgtttaatagagacagggtttcaccatgttgcccaggttggtctcaaactcctgacctcaagtgatccacccatctcaacctcccaaagtgctgggattacaggcgtgagccaccgtgcctggccctgggcagacaacttttaaaggggctgtcacagagagggggaagagggcaggttcggggaaccagggtagcaaggaaagacctcgctgaggaaatgccactggagaagagacacagtaaaaaccataataatggccaggcacagtggctcatgcctgtaatctcagcactttgggaggccgaggtgggtgaatcacgaggtcaggagtttgagaccagcctggccaacatggtgaaacccccgtctttactaaaaatacaaaaaattagctggatgtggtggcaggcacctgtaaccccagctactcaggagactgaggcaggagaattgcttgaacccgggaggcggaggttgcagtgagccaagatcgcaccactgcactccagccctggcgacagtgagagactgtctcaaaaacaaaaacaaaaacaaaaaagaggccaggcgcggtggcttatgcctgtaatcccagcactttgggaggccgaggccggtggatcacgaggtcaggagatggagaccatcttggctaacacggtgaaaccccgtctctactaaaaatacaaaaaattagccaggtgtggtggcgggcgcctgtagtcccagctactggggaggctgaggcaggagaatggcgtgaacccgggaggcggagcttgcagtgagccaagattgggccactgcactccagcctgagtgacagagcaagactccgtctcaaacaaacaaaaccataaaaataataaatagtgaatgctggtgcaatgctttgtgtgtgccagagctattcgatgtgtgtaaactcactgaatccatgcagcaaagctgtgagctagctgctgttatattttatatatttacataaaaatgctgatataaaagaaaatattttatattaaatttaacataaaagggccgggcacggtggctcacacctgtaatcccagcactttgggaggccaaggagggcggatcacgaggtcaggagatcgagaccatcctggctgacacggtgaaccctgtctctaccaaaaatacaaaaaattagccgggcgtggtggtgggcgcctgtagtcccagctactcaggaggctgaggcaggagaatggcgtgaacccgggaggcagagcttgcagtgagctgagatcgcgccactgcactccagcctgggcaacagagcaagactccgtctcaaaaataaataaataaataaataaaagtgtagcacgcataaaatttatccataaacagacgttttatatactgtacatttataaaaactatactttaaatgtatatataataatacatatttttatatgtttacttttttatttttttaactttatttttaccggaggatccagtttactatgggtattggaatgacttttctttttttttttttttttgagacagtcttgctctgctgttgcccaggctggagtgcagtggcaccatctgggctcactgcctctgcctcccgggttggagtgattctcctgcctccagcctcccaagtagctgggattacaggcatgcaccaccatgcctggctaatttttgtatttttcgtaaagacagggtttcaccatgttggccaggctggtctcgaactcctgacctcaagtgatctgcctgcctcggacacccaaagtgctaggattaaggcgtgagccaccgcgcctggcctttatatatatatatatatttatatgtaaagttttcatatagggaaacagaggcacaaaggcacaaagttttcgtgcaagaaaacgtagctaatggctgctctgggatctgaaccagggcccctaagtctgcagcttttcatttctggctctcaggcagcctcagggaatccgttaaaacaaacatgcgagtcagacaagtggcagtcacaggagagtaacactgcgcaggcgcagaagggatgtagtggcgcgcaggcgtaggaggcggggggagatgggggaggaaggccctgcagcggcgcgcaggcgcagaagcaagtgggccggagcggcgcgcaggcttaccgggggaagaaaggcgcgcaggcgcaggacgcggggaggggcgggggaagaaaggccctggagcgctgcgctggcgcaggaggtgaaataagtggcgcgcaggcgcaagagggtgggtgcagaagaggcgcgcaggcgcaggaggggcgggaggggcgcgcaggcgcggaccgcctggcggtactttgaagaaagacttctcgacgccgagacactgctggtggtactcgatgtaggtgagcaggtggcagctgttggagccgggcgcgatgttgttggcgtacttgatggccgtgctcgcgaccatgtcgtgcacagtgaggagtgtcttgttgctaacttagtccttgctgagccgcagtcgcgcctccccgtcgcgctccgtggtccgagtagctcagcctgcggacaggcgggtcagcggcggccggagacccccagatggacctagagagaggcgagcaggtggcgtgtcaggggcaaaaccagggagagatgggagcacaggcaggagcgtggcactgagagatggcagacggaggaggcgtggtgtatgaagtggattgccaagggagaaagatgaccagcgaggcacagaaggggatgcagggacaggtggacagtgagacgcactgacccagagaggagttcagcaggaaacccaccagcaagcagacaggtcagctgtaggcccactgtccctgccgggcgccgtctcctccccagggaccagacacttctttttttttttttttttcttttttgagatggagtttcactcttgtttctcaggctggagtgcaatggcatgatctcagctcactgcgaactctgcctcctgggtttaagcgattcttctgcctcagcctcccaagtacctgggattacaggcatgcgcccccacacccagctaattttgtatttttagtagagacggggtttcaacatgttggtcaggctggtctcgaactcctgacctcaggtgatccacccacctcggcctcccaaagtgctgggattacaggcatgagccaccacgcccggcgggaccagacacttctgacaactgctaaccacctgcacccccaaacccccatacacccagccgggcaccctatggtggtgctctccatgcccgcatcccatcaggcaacttctgaagagatagattgaaccctaaaggatcccaacactggctgaacggccttggccagccctgaagcgctagatccccactctcaaactggcttctctgggaacaccactaccctcacccaggagccaaggagccccaaactctgtttttctttcctgggtgttgagtgcctttctgtcgtggactctgaatctgtccgaggacatggtcttcaaagtatctttgttttccttgtcactgtctgggggcatctagtttgctgggcttgggcagacrgatcttcaaacgaaattacagtgggcagcaggggtgggagggtccagcagggaggcacaggattcccaccgagttatgggggtggccagggaaggcttctctgaacaatgggtagacactgaccaggcaaaggagggagggagaagcatcttaaaagaggtaacaggcagccagacgtggggtcatgcctgtaatcccagcactttgggaggccgaggtgggcggatcacgaggtcaggagtttgagaccagcttgtccaatatggtgaaaccgtctctactaaaaaatgcaaaaattagccgggcgtggtggcgcgcrcttggagtcccagctactctggaggctgaagcaggagaattgcttgaacccaggaggcggaggttgcagtgagccgagatcgcggcactgtactccagcctgggtgacatagtgagactccatctcaaaaaaaaaaaaaaaaaaagagagataacaggctgggtgcggtggctcatgcctgtaatctcagcactttgggaggccaaggtgggcggatcacttgaggcctggccaacgtggtgaaaccccatctctactaaaaatacaaaaattagccaggcatcgtgtcgggcacctgtaatcccagctactcgggaggctgaggcaggagaatcatttcagcctgggaggtggaggttgcagtgaacagagatcgcacctctgtactccagcctggggaacagagggagactctgtctccaaaaaaaaaaaaaaaaaaaaaaaaaaaaaaaggggggggttgggggctggagtgaagagaaggaggagcatagaaggaaatgaacctaccacacacattccccacctggtgtgcagcctagttcatccccaggaggagctgaggtatgtgggctcccagtccctccctcccatccacaacatattttcatgcccctgtcattgggaaggcagtgcccactctgggctctaccttctttttttttttttttttttttttttttttgagacagagtctcgctctgtcgcctaggctggagtacagtggcgtgatctcggctcactgcaagctccgcctcccgggttcactccattctcctgcctcagcctcccgagtagctgggactacaggcgcccgccaccatgcccggctaattttttgtatttttagtagagatggggtttcactgtgttagccaggatggtgtcaacctcctgacctcgtgatccacccgcctcagcctcccaaagtgctgggattacaggcatgagccaccatgcccggcctctggactctaccttttttttttttgagacagagtctagctctgtcgcccaggctggagtgcagtggcgcaatcttggctcactgcaagctccgcctcccgggttcacaccattctcctgcctcagcctcccaagtagctgggactacaagcgcccgccaccatgcccggctaattttttgtatttttagtagagacagggtttcaccgtgttagccaggatggtctcaacctcctgacctcgtgatccacccacctcagcctcctaaagtgctgggattaaaggcatgagccaccatgcccggcctctggactctacctttttatcagcttgatcactccccccgttctagccacagggggacagtggtccctagaccagacatccagaatgttcctgtccatggccagcctggtgccatcactgtgtatcccgtggcccagagccatgatggggacatggcccattgcctctttgtagaggccagttttagcgggcagggagggtctacccaagaaggcccttcactgccctgacaagccagtggtctgcaaggtgacagtccccagggaggagccaggggcaagtctggcagcaggagggattccagagtcactgttctacattgttgaggttgagtgagagagttcccaagggagctggaagaagagtggtgagatggaggaggtaaataaggtgtgggcatcatcgaggtcaaggaagcagagccctgggctcccagaaggttgagttagagaaggactttgagtcactgtgcctgggggtttatgaattcatttgcccaccaagcataattgaaagcaggggcgtgaagagatatttatacacccatggtttcttttctgggcgttgagtgcgtttttgccatggaccctgaaccatgccatggacccatatacatagaagcatgattcacaagagccaaaaggtggaagcaacccaagtgtctattgatggatgaatggataaatttatccacgtatatatgtgtacatacacacacacacatgtgtacatacatgatgaaatattcagcctgaaaaaagaaattttaacacatgctaaacatggatgaggccaggtgtggtggctcacacctgtgatcccaacactttgaggggctgagatgggaggatcagttgaggccaggagttcaagaccagcctgggcaacatagggagaccctgtctctatttttaaaaaattgttaaaaaaattgaaaaaactttaaaaaaggatgacccttgaagacattatcctcagttaaataagccagtcagaaaatggcaaatattcttacattatcacttttttttttttttttttgagatggagtcttgctctgttcccgaggctggagtgcagtggcatgatctcagctcactgcaacctccacctcccaggttcaagtgattgttctgcctcagcctcctgagcagctgggactacaggcatgcaccaccacgcccagctaatttttgtattttttgtagagacggggtttcgccgtattggctgggctggtctcgaactcctgacctcatgatccacccgcctcggcttctcagagtgctgggattacaggcatgagccaccatgcccggccgacaatttcacttttaaggtgcttaaagtagtaaaattcaagagacagaaaatagaatgatagctttcaggggaaggggaaatggggaattgtttgatggatataaagtttcagtttgaagagatgaaacttctagaaatgcgtcgtgttgatggttgtacaacaatgtgaatgtgcttaatgccaccgaactgtgtactaaaaaagggttaaaatgacacattttatgttacatatattttaccacagttaaattttaaaagccttcctgacattagtagattcttgtcgtttctcaaaaaacattgagagaacattaagagaacagtgagaccagggtgagaatcattatagaaaatacatacattcctctcctgtattcgagcttccctcacttgacatgatcaaccatttgtatttccttgatgaggaatcaatattgaaaaggaagtaaaaaaatatttgcaaaagatatgcacatctctgtaaaaagcttacacattttgagaaataggttagcagtgaggtgtctagatataatattaacatacaaaaatcaacagcacttccatataccaacattaactacctagaaaacctacaagtggggagatcacatggacagtagaaacaaaaactataaaatagaattatattgaccaaaaattgtacagtgtagtcatggataaaattagaagggtttggctgagttcagtggctcatacctgtaaccccagtgctttgggaggccaagacaggagaggatcccttgagcccaggaatttgaagttacagtgagctgagatcacaccagtgcactccagcctgggtgacagagtgaggccctgtctctatttttaaaaaactcaaaaaggtttactaacagaaacatgaaaatgcagaaaatgtggcatgagatatacctcagaaagggcactgtttacagtgtgagagctgaaacaggaagccagagtgttgccttgttcaacctcagctgggaatgtacagttggccactcaaatttttcactcctgtgtatgtcctggaatgacctctaaagtgccataactattgatttggggtttacaagcaaattctagcgatgaggcaaatttgcaaatatggaattggcagatagtgaggaccaactgtactaactcattaaaaagtaaaagcccgccaaatagttgaggagggccattgatgtggtttggatatttgtccctgcccamatctcatgttgcactgtaatcccctgtgctggaggtggggcctggtggaggtgtttgggtcatggcagrggggcggatccctcatggcttggggctgtcttcacgatagtgtgttctcaaaagatctggtcatttaaaaatgtgtggcactccctctggcttgcaactgctttcgccatgcgacatgcctgctccccttttgccctccgctatgattgtgagctccctgaggcttcaccagaagctgaacaggcaccagcaccatactttctataaagcctgtagaaccatgagctaattaattaaacctcttttctttataaatgaccccatctcaggtatttctttataacagtgcaatartggcctagtacagcaatcaaatatgacattagccttatcggcattgcattaattttttttttttgcaaggagaatgtcattttaaatttctggtgtatttaaaaaatggaactcaaaagggtctctggcctgcctctgagtatctagaagcttaagagacactgggagttttgttgctcctgataygctgtttctgtccaggctgggagatgttccctctcccactctccctactaatatttcggrgacacactatgaatatgctttatcagctctggtctgcttataatatgactgttggatgggagaggaataaactatcttctttaagtttacttaacttactacaacagaaaactcctccctaatgayggaattagtcaagagtcataccttgactcttgagttaaccaagagtgactgtgttgatgataaccattaactcaaaccgaggactttctggagttagatactgcattccctgtacatcatctccatgaacttccatggccaccctccgagatggggatctactttccaggtttaaaatctccgagcctcagacagttgaaatcacagctggtcacaatttgaacccagaactgatttcagagtccaagccctccccatcacactaaataaaggacaaagtatttctrtcaagccaaaaatcaagacatgggaccctgaagtgctttattatcaggacttattggaagggtttcccagttgcttccaggcaggtgagttgatttgggggtccagttcttcaaatctgtgaggctttttctttctaatgtctgagtcccctgaggagaaaaaaatcaaatgggagcccacaagttcaggtctttcttgtaaatcaggcagtttttagtagacttcccaataggcttccctggagtcatgacttgaaggtccttagaaagatatacagtgattttattgctttgaaacgtatggcagrttcttctagggagcacctctccaacagacgaacaatcaagaaactgaccaatgaggaatgtggcttcttaaaaacagcagggagagcttctacctagagcagcatttcacttattgcaatgaggtcttcctgctgaaggctgcaaagaggagaaacacaagttatcacatggggattctcgtaatatgtgcattcagtctccaagatcccacagtcaccatatgatgaaaatattcccgagtgaatcgatccatttataaattggctgtcacccaaaatctccccacaatgaactttagagtggcactatccacaagaaacattactggagccacctatgcaatttaacaatgtatagcagctacatttttaaaaaaggaacttggccaggcacagtggctcacacttgtaatcacagcactttgtgaagctgaagcaggaggatcgcttgaggccaggagtttgagaccaacctgggcaacatagaaatacctcatctctacaaaaacatttaaaacattaggtatgaatgcaccactgcactctagcctgagcaacagagcaagaccctgtctctaaaaagtaaataaaaatttaaaactggtaaaattacttttaataataaatattttacgtaacccggtattccaaaatatcatctcaacatgtaatcaaaattttaaaatactgatgagatattgtatattctatttttttttttttttttttttttttggkgctgtgcttttgaagcccagtgtgttttatgtattacagcacatcttggtttggacagaccacatagtggccagtggctgccatattggacagcactggtgtaagagggtccatctctcactcccacatcaatgtccaatggtttctcattcaactggaaagtgaaattggaaatcttgtgaaagatgaagaattatgaatgtggtacgttgaactgctgggcccacccacaagacatcaacaaatgaaggtgtggaagggttaaaccagttaacgttgaacaaaggacaatggatatgatgagttacaagctgagttgtatccctccacaattcacatgttgaagtcctaacctttagtacttcagggtgtaacttatttggaaactagatcattatagaagttaaaacgaggtcataagggtgggccctaatcttactaacctgtccctataaaagggaaatttgaacacagtgacacccagagggaagatgatgtgaagacagagagagaagacagccatcagcaagccaaggagagaagtctggaatggatcctcccctcacagccctcagaaggaaccaagccagccagcctctcaatctcacacttttagcctccagatctgtgagacaataagtttatgttgtttaagccctccagtctgtggtactttgtaatgtagccccagcaaactaaaacatgggttggctggtggcattagaacaagttgcccatgaaaaggttacaggcagcctataggacaattgaagatgcattctactttctgcctgcactgtgcatctagtgaagaaaaaaaaaaaaaacacctcaataactatcagtgattcatggtgtcatggaggctccctctgcacatgtcttggggaaaagagaggataaacggtggatagtggaagttcaagcctccatcccttattatctgtgtaatgggccaacacacctcattccttgagttcctggcaagtagaactttctccactaaagtttctgacaaaggccttctccaaataagacccaatgagacatttgggattcattgcctcctactttctagaaacaaatagaaaaggcaggaagcacagctaacaacattggtggccagctgaaggagtttacacaccctaccatgaccctggtagagtagagacagcatgagttgaagcctgctactcagaatccactgcaactaagagtgtgtgtgtgtgtgtgtgtgtgtgtgtgtgtgtgtgtgtrtgtatgwgtgtrtgtgtgtgttttctgcagttccagtcacagatctgcctgccacacagtggagccctctcttggactctgaatgcatagcccagcaaagccaagcaactgaatctcaccatcagaacagctgagagcagctccatcaaagcagtcagtggtacatgtgatcaatttgttttttgtatttctgggctacaaaatgkctcttaagtttcatcatyggacctatcgagaaaggagaaawcaattgagttgtggagataaaagaaaattacacacacccatgcatgaccaggcaacagagtcccatgcctggggctaggctgggtggctggctgtgccattgactttcagggtgtgtaacttttgccatctgtatggggatgataaaacttccatgtgatccttcagctgtggtgaggattctgtgagctggaaggtgaagagcatggtgcattctgtgcctgatgtggactgtgcacccaatggaggagggatatcatcatctcaaaccatacccctatccccattttacaggtgaggaaactggggcatagagaggaccagttcctctgaggtcagccagcaagtgcacggcagaatcaagtctcaaactgggagttgtctgctccctgagcccaggactttcattgaaagcctctgagtcaccaggggcattgaagcccctctgggtgtctcaagcaaccccacaaggactgtgttttcaacttatagatgagaagaccaccagcctggacaacatggcaaaacaccatctctacaaaacaaaaagaggatagcggccaggcacggtggctcacgcctgtaatcccagcactttgggaggccaaggcgggttgatcacgaggtcaagagatcaagaccatcctggccaaaatggtgaaaccctgtctctactaaaaatacaaaaaattagctggacgtggtggcacgcacctgtagtcccagctactcgggaggctgaggcaggaaaatcgcttgaacctgggaagtggaggttgcagtgagccgagattgcgccactgcactccagcctggcgacagagtaaaactccgtctcaaaaaaaaaaaagaaagaaagaaagaaagaaaatagccacgcatggtggcgcgcactcatcccagctactcaggaggctgaggtgggaggatcgcttgagcctgggagttcaaggctgcagcagcaagctgtgattgtgccatcgtactccaacctgggtaacagagcaagactctgtctcaaaacaaacaaaaaaaaaacaagactcagtgggacaagtcacttccctgtgtagaggggacaggatttgaacccaggttgttcattgccacatacttgctctgattcttccatccacaccgtcagattacagccgagcgctgacagcaaactcgcaaatgaaagtacattagtagaatccagtatccccactctggagtgagcccttccctcatgggggaagagaggcaaaaataaaacatacagagactaatttcatgttctgatgctttaaagaagacagggtggtataatgggggtggcagcaagctactgggtgaaatattaaggacgatggcaagccactttagccagcatggtcagggagggctgaaaccatccctgaaaactttataatattaatcagagaagaagggagggggacaaactaaaatcagccacacttacagcacactcaacattcatcattaggtcagtttgctctctaaccccttcctcatagctagctgtttgcctattgccccagaatcacacacacacaaaaaacccaatcacaagatatagttccccttaactgctctacagataacatattaagcattgtgaaaggtcaagttttccatctgagatatcctttcaagtcctgcataccagtgaaactactgatgcccactgatctgaaggaccccacgggagctgacttaccaaagaatgcagcttccacatccgatgatttcatcccctttaccycaaccaatcaatgactctaattttccagcccttcacccccaaagatccccttaaaaccccagcccagaattcctcaaagagagatttgagggttccttccatctcggttggcttccctgcaagggaatttaatttccttttttatttttgtttgtttgttttttgtttttgagacagggtctcactgcattgcctaggctggagtgcactggcatgattgtggctcactgcagccttgacctccctgggctcaagcgatcctctcagtctcctgagtagctgggcaccgctaccatacccagctaatttttgtattttgtgtagagttaggatttcaccatgttgcccaggttggtctcaaactcctgggctcaagcagtctgcccaactcagcctcccaaagtgttgggattacaggcgtgagccactgtgcctggccataattaaactctgtctttgctgcatcccctgctgtctcagtgtattggtatattactgtgcagtgggcatacaaacctgggggtcctgtaacaaggctgctctgagggggaagaggcctgtagggtgagacctggacaatgagaagaagccatccaggcaaggaattgagggggaagggtattcccagggaggcagactggcaggtgcaaaggccctatagttggacaaagcccagagagctgcaggaacatcaagaaagcccatagagttggtgcagagtgaatgaaaggtcagcaggcgagagattgtatagagctatagtaaggaggttggattttatttccaagatgaggagctggggaccagttagctgaaggtggcagcctccctctcctggtccctggctggtytcatagaccctctgaccttcagaaaaggacctgtctcttcagagcccacacagtcccagatgctaacaagggaccagcctccaaatgtcatggccactcacctagctctccaccatagatggaaaagtccttctccaagatgacccacttttsaatcytctgtgcattgttcatggcttcctggttcacagcattgatgccttgctggatggccttgtagaccaggsggtcttgctgcttcacaatctcagtcacggtggatgcctggctgcccagacccygacagaagttgatggcctcraagttcagcttgtccagaggttctccgctcatctgattcatctcacactgcccccagacacctctgtcaccacccatgctccttgaccagcacccctccccaggcccacagaccaagaagtgggtcttgaacccacagrtgcatcctcttgaccctggggtggggccagggaacccaagacyggctgcagagacttcccccaatgacagcaaacccatgttaccttcagcgtcagcaacatgctcagaaacttcagtttatctcctactaacatggcgttactgatgatggggatcttcttcttaaccaaggtctcaacaggaatggggggcacattttcaccaccagcagtgataaggatttctggaacagagcttggcttggtacatgtccagccatgacaacgtggaacccccagtttgagaccagcctggccaacatggtgaaaccccgtctctactaaatatacaaaaattagccaggtttggtggtgtgcacctgtaatcccagctactcgggaggttgaggcaggagaatcacttgaacctgggaggcggaggttgcagtgagctgagatcatgccaccgcactccaacctgggcaacaagagtgaaacaccatctcaaaaaaaaaaaaaaaaaaacctagtggccaggcacagtggctcacacctgtaatcctgccactttgggaggctgaggtgggcagatcacttgagcccacaagtgctagaccaacctgggcaacacagtgaaattgggtctctgcaaaaaaatagccgggtgtggtggcacacgcctgtagtcctagttactcaggaggctgaggtgggagaatcacctgagcctgggaagttgaggccacagtgagtcataattggaccactgcattccagcctggccaacagagcgagaccttctctgaaaaataaaatagtaccagcacagaggaaaactcaagaaaagaattttaaaattccttatgacctcattttggcacccagatccagccatgcctgaagccagctgaccttttggccaactgaccttttcagttacgttgagtcaacagttttgctttttatttttttcctcaaacctatttaaacccatcttaaatgggtttgagtaaaaaagcactaagtgttctccatcagattttggcaaactatggcccatagtggccaaatccaggccactattcaattttgtataaccaaaagctaaaaatgaattttacatttttaagttgttggaagtcaaaagaagaattttttttgacacataaaaattatgatattcatattggcagctggccacacccattctttatgtgttgtcaacagctgtttttgtgctacaaatcacagagttgagaagctacaacagagacacatgttttgtgaacccaaaaatatttactaaagggccctcttcaggaaaagttggcttatccttgttctatactttcttcaatccttacaactctgtcgattattatcctcttaaaatgcaggagaagatggcacttttttactcaagcccatttgaaccagcttgaatgagtttgagttaaaaaaaaaaaaaagtaaaactgttggctcaatataactgaaaagttcaaaaggtctttggctttcagatatggctggatccaggtgccaaaatgatgtcacaaggaatttctttatccttctcttactgagttttcctctgggctggtgctattctgaaaggggcttcaggaggttccaaggcttgtcttttgcaggtccatcctcctgagggtggaccacgggataccaagtgaccaaggggtaactgtttgctggacaggaggatagagctgggttgtacagactgaggagtttctgcacagctcctcttggaaggtgaggaactgggggtggccttcgtgctggtaccctgggcccttaaatgttcagggtgggcctgcttgcaggagattcccaaagagctcagcccctggtacctttgatgtggccggtgacatagaggaaacccagaccgtccagctggcccagatccccagagtgtagccagccttcatcatcgatggcctctgtagtttcagtctcactttccagatagcccatgaagatgtgcctaccccagaggcagatctccccaatgccatccttgttctgctggaacagcatattcttacacccagtcaagatcttgccacagctgccaggggacagaagcagagaaacaggctcatagggacaaagtcagccacccagctctgcctggatcttcagcctaggtgcctaatactctgctcagctagagcaggctggatatgcaccccagcgcacagaaggaggtgtttgctgcagtgtttaatccagcgtgtcagattcccaaaggctttgtgaactgggaaacctagcagtggccaggtgtggtggctcacacctgtaatcttaacactttggaaagccgaggagggaatattgctcgagcccaggagttccaagaccaacctgggcaacatacggagaccccgtctctacaaaaataataaaaaataaaagttgggcatggtggtacatacctgtggtcccagctacttgggaggctgaggtgggagaatcacctgagcccaggaggtcaaggctgcagtgagtagtgatcacgccactgtactccagcctgggcgacagagcaagactctgtctcaaaaaacaaaaacaaaaacaaaaacaaaaaatgaaagaaaatccagcagcattgcaggctgtttttcgtttttttttttttttttttttttttttttttttttttttcatctccacatatgccggcaaagaaaaaaatgcctttggcttaaagataggaacaaaaccctcattttaaagaaaacaggtagacctctctgcagtgattaggacagctaattttaagtacggcaaccaactacaatctctttagaggtaaaagttactttcataaaacagagtagcactatttgaaatctgggttctttgtctttttttttttttttcctagagatagcactggccagtgcagttctaggatgcaggaaaggaaatattttctccgtgtgttgctgagatctctttgattaacagttagcaaggccaatggtcccagggttaaatgtaggtattcccctggttagcaaaagaaaaaatgaagacagacctgagaaatttaaaacttacaaagagctgccttatgatttcccccactgaagcctttttaggtatatagaaaaatccagaagccataagagatcgataagttcaaccatctaaatttgtgaccacaaatttctgcacagtaaaaaacatcttaactaaaatcaaaataccaatgacaagccaggggataaaatatttgtaactcatatgaaagacaaagggctgattttcctaatatgtaaagagtgccaacaaaccaataataaagggaccaataatctaatttttaaaacaggcagataatatggacagacagctcataggaaaggaagtacaaatgacttttaaatgtatggcaatgctgggcatggtggttcatgcctgtaatcccagcgctttgggaggctgaggattgcttgagtccaggaattcaaggccagcctaggcaacatggcaagaccccatctctacaaaaaaacttttacagaattgccaagcatggaggctcatgcgtgtagtcctagctagttgggaggctgaggcaggaggaatgcttgaatccagaagttcaaggttacagtgatctatgattgtaccattgcactccagcctgggcaacaaagtgagaccctatctctaattaaaatttaataaataaacacatgtatgaaaagattttttcaaacctcacccatgctaaaaggagggagtcagggagagacacaaccagaagattctatgactgacagctctcagatggggagttgaacctcaatttggtattcttaaagttttcttatcattgggttcaaccttgcagcctagggcaagctgagcttgggagaaagccaggaatcggccatggaggtgttttgagatggaggatcatggggatgaaaggtgctgaggtcacaggcggtgaccttgaaggcagaactcacaagtgacaaacggggagaccatggaatgttcagagagccatcccccttatctgtgggctctcttaccatccagggtttcccacggtcatgcggagttaggacttggaggctggagaacaggatcattctggagacaccacgtcaggattcctcttaacccagaggcccatctatccacccaccttccccctcttgaccccatgttatgggaggagcaggggtctgccccgggggctggtaccttagaagcctgtagttattctggttggatatcgtgtggggtcccgagctytcactcaacccatacaactcgcctataggtatgtccaagcttagaaagaactcggcagtctcttggttgaggggcgcagtcccactgataaaagagtgacagtgatccaagccaagggatgtcttgactttgctgaacacgagagtcttagccatgcggtagctcacgggagtattatatttcctgtgaataagaatgccgtcargtggagaagggctgatgggacccactggagaaggctgagcctcctcaccaactaccctcccagccctctggatgctccacctaccccaacatcttttttgagttgaccttgaagccaatgtttcttgcccacacgaatgccttcttcttcaagcccatggacttggcactatttttcttcaccatctcatgtatcttctcccaaatttgaggcactccaatgaagacagtaggttttacctcctttagagtacttaccaaggtgccctgtatggaacgaagctaggttagccacagcagggccttccgtgcaccagggatgtccatctctcctgatccacccaactttgcccaagagaacattccttcactgatcagattacgcaggactcccaaccaaaaggagacaacccattagctgggttggccagtcagatttttgcactctgtctagggatttgatgagaggcataaactggtaaaatatttttggaaggtaacatgacagttctattaacattttaagtgcaacctgtcaacttcacttctgtgggtgaaggaattcagctgaaggaaagactcaggcacacaaagaaacacgttcaagacgttctttgcaacactgttttgtaacagaatggaaacagcttacaggttcaatgacaaagggttggctaaagaaactgtggtccaagcatgcagtggaatattacacaactgttaaaaaaggatgcaagattctcccccaaagagacctataggttcaatgcaacccctatcgaaatctaggcaagtttttttttttttaaatacaaattgacaagctgactttaaaatttatatagaaatgcagaggacctagaatagcccaagcaattttggaaaagaaagacaaaattggaggacttactacctgattttaaaatttattctaaagtagggtgaacaaccgtcctggtttacccagaactgcaggaatatctgaaatgtgaaactttctgttttaaaactggggaagtcccaggcaaaccaggaaacgttagccatcctgctatcaagctagtgtaataagtcagtgaggctttggcgtaaagacagagatgcagatcagtggaacaaaatagaagatccagaaataaaaccttaaatttatgctcagttgattttcaacaaaatgccaaggaaatttcgttggggggggggcgggtggggactattcaaatgcaaaacaaaataaaacaaacaaacgcttccacaaaatttagggttagagccttatttctcaccaaacatgaaaattacctcaaaatgcattatagccctaaatgtaagagctcaaactaaaaaccttttggaagaaaacgtagaagaaaatccctgtgactttagagtaggcaaagatttcctagatatgataccaaaagcataaaagaaaatagataaatcaaacttcatccaacttaaacactttttcctcttcaaaagattattgaggaaacaacaagccatagaactgggagaaagtatttgcaaaccacaaatttggtaaaggatttgtaaccagaatatataaagaacccttaacactcaacaatgagattagatatgcaaccaatttttttcatttttaatttttttcctttctcctttctttctttttctttcttccttccttccttcctcttttttcctccctccttcctttctttccttctttctcccctcccctcccctcccttcccctcccttctcttcccttgccttcctttcctttcctttttttttttttttttttgacacagtctccctctgttgccccggttggagtccagtggtaccatctcggctcactgcagcctttgcctcccaggtttgagctattctcctgtctcagcctcctgagtagctgggcttacaggtgcacaccaccacgcctggctaatttttctttttcttttttttttttttttttagtagagacggaggagacggagtttcaccatgttggccaggctggtcttaaactcttgaccttaagcaatctgcctgccttggcctcccaaagtactgggattacaggcgtgagccgccgtgcctggcttttacttttctttttactagtcatgctagcacagaaagagcaaccacatttttatatgggcaaactatttgaacagatttctttttccaaagaagatatgtaaatggtcaataaacacatgaagagatgctcactatcattaatcaccaaggaaatgcaaattagaatggcaataataataataaaacagatagtaacatgcgttagtgaagatgtagagaaactgtaaccttcgcacatttctggtgcacgtacttcagaaaacaatctggaaatttctgaaaatattaagacacttttgtcactattcagattgacaagttgtaaacattttgacaatattaggagttggtaaggatgtgggaaaatgggaacttctcaggtcctgtaggtaaatgtgtatgtattatgtattcagccaagaaaggaaatatgtattgaagacctaacacatctcaggcactgagcatggggcatatgagagggattgagaggggccaaggaaatatttagcagagagctaagtgacaaagaagagtcagccctgcaaagaacaagagaaagaaccttctagaagcacgtgcaaaggccctaagatttagcctgcttgatggagagtgtgggaggcaaaataatggccccctaaagatgtccacgttctaactcctgggacctgtgaatatgtaatctttcatggcaaaagggactttgtagatgggattaagttaagaatcttgagatgggagatcatcctggatgatctgggtggcccaatgtcatcacagggtccttataagagggaagcaggagaggggaagaggctgcactgctggctgtgaagatggaggaaggggccctgagataaggaacataggtggcctctagaagctggaaaaggtccccaagagcctctagaaggaatgcagccctgatgacatattgattttagcccagtgagaccattttcaaacttctgaccaccagaactataagataataaatggaccaggcgcgcttgcttatgcctgtaatcccascattttgggaggctgaggcaagcagatcacttgagttcaagagttcaggaccagccttgccaacatggtgaaatcccgtctctactaaaaatacaaaaattagctgggcgtggtggtgcacgcctgtaatcccggcttgggagactgagacatgagaatcgtttaacccggaggtggaggttgcagtgagttgagatcatgccactgccactgcactccakcctgggtgacagaacgagactccatttctaaataaataaataaatattgttttaagtcactaagtttctgttcatttgttgtggcattaacaggaaactaattcagagaatgtaacttggggaaaatgtcagagttcttttctggctccgtttgcaaagtctagacatgtagaaaatcactgtaaaacaaattagtcaggcatggtggcacatgcctgtagttctggctacaggggaggctgaggtgggaggatcctttgagcccaggaatttaaggctgcagtaagctatgatcatgccactgcattccaggctgggtaacagagcacgaccttgtctctaaaaaaaaaaaaaaaaaaaaaaatttagaaaagaaatcaaagtgttctttcacataactactttgcaaaacctaccaatgaatgatatccagctaaatcaaggaataatccaaaaaagaaggcaaagaccccagaaaataggggatccaacccaggagtgggaaaaagggatatccctgtatggcagcttgtagaagatgctgttgatgtcctatcagatctctagtggcccacagttccctcttttccagaaaaccgcccttacttagaaataactgggaagttatgctccctatcccacatggatgcctgagcccacagccaatgactatctgagttggggttacaaaagcacagcctccttgcctcaaagtggaacaactctggtgtcgttcatgcctcagagcttcctatgggatcagtctgaagttacaatccagctgaatgtgtgtcctttcttgttttttcccccagcctatccttctctcctcacttccttttggttttcacctgagagctccccattgataaatcacaaagatctccaactcagattttgcttctagggtacccaacctaagacaacctaaaacaacagtccagctaagtgcaaaaggatggaggaaaaaaataatgcaatggagctgggtgcagtggctcatgcctgtaatcccagcactttgggaggccaaggctcacctgaggtcaggagtttgagaccagtctggccaaaattgtgaaaccccatctctactaaaaatacaaaaatcagccaggcatggtggcacaggcctgcagttccagctacttgggaggctaaggcacgagaattgcttgaacccggaagacagaggttgcagtgggccgagatcatggcactgtaactccagcctgggcaacagagcaagactctatctcaaataataataataataataataatgcaatgaatatttgaacatttggagactattgataagcatgtgacagatcagatggagcaactggacatgtatgcaaaaacttcaccaaactggaaaagaaaggcaacttaattctgggaaaaacaaaaagttgtaccaagcaggaagtggaatcatatgataaactacttggctcagttaactaagaataatttatgttgagagaatggggaaggagaaatgagaagacgggagaggaagggagctaaatcctcaccacaatagaaaggcaaaagataatacttaaagggtataagtcaagaaaaggtggtataaaaattctacaaatatatgcataatcccagtaagtggaataaaatgaagaccacaaacaacatcttatcaattcagatcagactttgctgccaaaaactcctgttttttggagctttttagatttgggaatactgacttataaacacacacacacacacacacacacacacacacacacactctttactttcagtaccaagtacatctttgtcttgggttgttcagtgttcaatctacataaccatacatggatgccctgacttggataaagataaaaactaggagaatgtagccagctggttaaaaaaaaaaaaaagttgttttatttggtcaggtgttttttgttttttagaaaaatttactattattattggtttttgtagagatagggtttcgccatcttgctcaggctggtctcaactcctgagctcaagcaatctgcccgtcttggcctcccagagtgccgggattacagattgagccactgtgcctggtcttgtttttaatgcttctaaatagagcattaagatgagggcagagataaaaccgttagacatggggcttcacccaaaaaatctgtcgaatgattaacaaccatctactcacctgggctgcccaagaggatgaagtcggagccccaggtccttactcaatcttaccttgagagcatctgcttgagcaaagtatgtgagcgccccaatctttatgggtacccagatgtccatcatctgtgctgcaatatggctgagtgggaggtagctaaccaccgtctcatgcttgtctgtcagtttaaagtcctttgtcactgctcctgcaatccacgtgatctgtaacataagggacaatccaaggtgcctcaccctcatagaagggccattttatttttaaatttttatttatttttcagacagggctcacccagactggagtgcagtggtgtgatcacagctcactgcagcctcaaactcctgggttcaaggaatcttcccatctcagcctcctgagtaactggtactataggcacacaccaccacacccagctaatttttttttaactttttttgtagagagggggtctcactatgttttccagcttggcctcaaactcctggcctccagcgacctcccgcctcagcctcccaaagtgctaggtttacagatgtgagcgaccatgcccagcctggagggcgattttaaatgtatttagctaaataaataaactaattaagtaaacacttataaagcacctactatgaccaagacactgtcttcatactttacaaacaccaagtcatttaatcatcataacacctgggggttggtaactataattctcccaaaatttttggagcttcacccaaaaaatctgtcgaatgattaacaaccatctactcatctgggctgcccaagaggatgaagtgggggccctaggtccttattcgatcttaccttgagagcatgtgcttaagcctaaagtatgtgagtgccccgatctttatgggtacccagatgtccattgtctgtgctgcagtctggctgagtgcgtgtgtgtgtgtgtgttgttttttcataagtcagtataaggcaccttggattgtcccttatgttacagatcacgtggatggcaggagcagtggcaaaggactttcaactgacagacaagcatgagatggtggtcagctacctcccactcagccatattgcagcacagatgatggacatctgggtacccataaagattggggcgctcacatactttgctcaagcagatgctctcaaggtaagatcgagtaaggacctggggcccccacttcagcctcttgggtagcccaggtgagtagatggttgttaatcattcgacagatttttttgggtaaagccctaggtctaacggtttttttaatcagggagaattatgtgaaaacagaagcacagagtccttaactaacttgcctgaagttaggaggagttgcaaaatttagcaggcagctttaggagtagggaggttgcagacttccttgggtccaacgacagaactcagaaaactggattcagcaagtgtcccagagtcaaaccctgactccactgtttgctagacatttgggctatttccttaaaatccctcgtggcttttattgcctcttctttaaagtggggacagaggcttctcaggtccaatatagaactatggaaccaacatggtcaaacaaacaaaaaggctacccataatcccatcatataaacaccccagtaattagcattattagcatttttctttctccaatgcatatgtagatgtaaagttttagtgtacctataattttgtcacttatatttctcactagtgtcataaatctctggtgaatagttacttcattaatccagccacccagacctcctcgctgttgctccaatgcatcaggcatggtccagcctcagggcctttggactggctattccccctgcttggaatgctctttcttcagccttttccctcaccgtcccccacccccatggctggctacttcttgaacattaagtctcagctgaaatgtcacttccttagaagggccatctcacaccatctaaggtgaaagtgccattgactgcctaagtctgtacgtaccatgtcacacaaactgaatgttttcatttgttcatttcttatctgttcccaaggtccagattgagtctgtcttgtttgctgctgtttcccctgctcctggaatattccccagtacatactaggtgctcaatgaatttttcttgaatgaatgaggaaatagaaggaatggttaactgcagtaaaggacataaagcagtcagcccaaaatatccctcaaggctagttccacttctttccctgggctcaggatgaaggctcccataaaccttgtcatgcacagtccagggttcaaggaacctakcacacttgttgagagaaggggcttgttgtgtatagtctatgatgtacaatggtttagacactcctggttcagatctcagttcagagcttcccttgctctgtgatcttgaccaagtaatttcctctgtctgagcctcagttttctcatctgtaaaagggttagtgacaaaattttcctcgtggggttttagtggggagttaaaatgtgtttatcttagcactgaacatagtgttccctacacgggagaaacactgagctgtagacatctggcaagaatctaaggctacctttaacttcttgctgtaaagatgatgatgagacagggcctcactctgtcacccaggctggagtgcagtggcagcatcatagctcactgcagcctcgaactcctgggctcaagggatcgtctcacttcagcctcccgagtagctgggactacaggcatgtgccaccatgcccagctaatttttaaaacatttttgtagagatgaggtcttgctgtgtttcccagccttctctcaaacaatcctggcttcaagcaatcctcctgtctcggcctcccaaagtgctgggattacatacataagccactgcacccagccaaatacaatattaatagctatccttgacatggcttcctgtatgccaggcattgttctaagcattttatgtatatgtggtagattaaacagagctgcagattctctgctactcctcccattctgaggtggaatttgtttctctttcctttgagacagaattggtccagtgatttgttttgactgacagaaaggagcagaagggatgctgtggaaattctgggactgacaaatctttgggaccacttgctgttgggagagtcagccaccaggttaagaagttcaagagtgatggccaagcgtggtggctcatgtttgtagtcccagcactttgggaggccaaggcgggtggatcacctgaggtcaggagttcgagaccagcctggccaacgtggtgaaaccccatctctactaataatacaaaaattagatgggtgtgttggcacacgtctgtaatccctgctactcaggaggctgaggtgggggaatcgcttgaaattgggaggcagaggttgcagtgagtcgagattgtgccactgctctccaacctgagcgacagagcagactctgtctcaaaaaaaaaaaaaaaaaatagttcaagagtgatgtcctcatgttggtcctgtaagctacccacagacagcatgaccctgcccagagccctgtggcttgggctcagcgtggctgacaagtgtcatcttccctattgtggaaagccttgtggtttggaaccagaaggatatgaatgagaatctgccacttgctaacagtgtattgatacgtgatggctgacaacggacatcagatgtcagttttcaggaagaagatcaaaattactggtaaatggataagttttgaactgaaaatggaggaaggagaggcaggacctcttggagtgcccacaggaagaagctgcggcgtaggaaaggaaagctgcaagggcctgtcaaagatcagctcctgaggaactcagagccccatggaaaggataggtgggagtgcttctttgcttcccactcgcctttgacaatatcctggtcactaaactctcagggagctcctctgcccttgcaacccaggccaacaccatcggtgctgattagagaacttcccagggacagagaaccaggtggtcagttcacacaggcatgcccacactcccctcagacctgaactgagacagcaggcaccacactggttgtgcacctgtggtgccactgccctgcctggggattctctgcccttgacccactgcaccaccagattccccacaaacataccccacaacgcgctgtgactttggcaagcacaagggaccagtgagcctctggggggccgcaggatccctgaagatctaacccttggcatgggtaacccctaaaggaggaggagaaygcagcccaccaaagccccccttgggacaaaggaaatgtgggtgtggcacaaaccactggagtgggcagcacccatgcctgggaaaagacatggagaaggggtcatttcccacctgccctcccaccccacactgctgccaggaactaaaggatgaagcctttataaacagaagattgtgagccccatgacaggggtgtgatagagaagcggactgcattcctgctggctgaggacaaggagctggtgcattccctgcccctacccctgagacctcagtgcaccccatcatgatctcttcctgctacctccatcagggtatgcatgcctacttggcaccagcctacctgctggttctaacttttaagtgcgatctactggactgcatcctgcactgcaccaccaaacaaaaatcttgctactggaagggtttattgacagtgcatgagataagcctcctgagacctccacaccctcagtcctgcaggagatagtgttggctgttatgtccattacatcattacaacaagcagcatctgagaaagccactgcatagaagctgtccacaaccatggaacccatacagaccttagccactgcacagaagctgtccacaaccatggaacccgtacagaccttagccactgcacagaagctgtccacaaccgtggaacccatacagacctttggcccccaaaagcactcagaagcaaggccatacaatcacacacaacatacaccacagccataccctcaagggaaactagaattaaaaaatacaaaagccccatccaaacaatagaagattcaaaaacaagaagtgacagctccctcagataagaaggaatcagtgcaagaaatctggcagtagaaaaagccagagtgtttcaacacctccaaagaatctcaccagttctctagcaatgggtcctcatcagactgaaatgtttgaaatgacatataaagaattcaaaatatgaattggaaggaaacttaatgagatccaagagaaagttggaaaccaatataaggaaactagaagaacacttcaatatatgaaatacaacatagatatattaagaaaaaaccaaattgaacttctggaattgaaaatttcactatagaaatttaaaaatatagttagactagaccaagcagaagaaagaatttcagagcttgaagaatggtctttcaaacaactcagacaaaagtaaagaaaaaagaaataaaaaacccaaagtatttgagaaatgtgggattatgtaaagcaaccaaacctgtgacttaaatgcattcctgagagaaaagaagaaaaattaagcaacttggaaaacatatttgagggagtaatacaggaaaatttacctaatcttgccagagaggtcaacatctagatatgagaaatccagagaactcctgtgagatgctacacaatatggccacccccgaggcatatagtcatcagaccaaggtcaatgtagaaaaaaaataaatcttaaaggcatctagagaaaagggccaaattacatataaaggaaattccatcagacgtacagtggatttcttagcagaaacctcacaagccagaagagattgagggcccatttttagccttcttaaagaaaaataaatgccagccaataattttatatcccactaaactaagtttcataaatgggaaataaaatatttctcagataagcaaatgtaaaggaatttgtcatcactagatcagcccgaaaagaaatgcccaaaggagttctaaacatgagaacaaaagaacaatacttgctaccataaaagtacatgtaagcacaaagcccacagaccctataaagcaactaaacaatcaagaatacaaagcaaaaacacatgacaggaacaaaacctcacatatcaatattaaccttgaacataaacatcctaaatacagcacttaaaagacatagagtgacaaatttgataaaaaataataataaataagacccaacctgctgctgccttcaagagacccatctcacatgtaatgacactcagaggctcaaagtaaagggatggagaaagatctatcatgcaaacagaaaacaaataagatgagagggtgctactgttttatccaataaaacagattgtaaactaatgacagttaagaaaaaaaaaaagacaaagaaaggcattatataatgataaagggttaaattcaaccagaagatctaaccaccctcccaacatcagagcccccagatttataagacaagtactactagacttaagagatagccatacaataattgtgagggacttcaacaccccactgacagacagaacattgaggcagaaaataaagaaatactagactaaattggacagttgaccaaatggacctaatagacatcttcagaatactctacccagtggcctctgaatatacatttttctcatctgcacatggaacgttctctaagattaaccacatgctaggccacaatgaaagtcttaataaatttaaaaaaatcaaaatcataccaagcatcttctcagaccacagtggaatacaattagaaatcaataccaagaggaaccctcaaaaccacacaaatacatggaaactaagcaacttgctccttaatgacttttgggtaaacaaattaaagaagcaataaaaacaatctttgaaacaaatgaaaataaagatactttttaagtgggctttattcctgggatgcaaggatggttcaacatacacaaatcaataaatgtgattcatcacatacacagaattaaaatcaaaagccatatgatcatctcaatggctgcagaaaaagcatttgacaaaatccaacattctttatgataagaaccctcaacaaactaggcatcaaggaatataccccaaaataataagagctgtctatgacaaacctgcagcaaacatcatactgaaggggaaaagttggaagcattccctctaagaactgaaacaagacaaggatatccactttcaccactgctattcaacatagtactagaagtcctagccagagcaatcaggcacaagcaagaaataaaagatgtatgaataggaaaataggaacagaggaagtcaaattatctctgttcaccaatgatatgattctacatctagaaaaccctaaagattcctccaaaacactcctagataaatgacttcaataaagtttcaggatacaaaatcaatgtacaaaaatcagtagcatttctatataccaatattcttaaagttgaaaaccaaatcaagaattcaatcccatttacagtagctacacaaaaaataaaatacccacagacacatttaaccaaggagatgaaagacttctacgagaataacttttcaaaacattgatgaaagaaatcacagatgacacaaatggaaaagcattccatgctcattgacaggaagaatcaacattgttaacatgaccatactgcccaaagcaatctacagattcatcacaattcctatcaaattaccaatatgatttttcacataattatataaaacaattctaaaatttatatggaaccagaaagcccaaatagagcaatcctaagcaaaaagaacacagctagaggcatcacattatctgacttcaaattatactacaaggctatagtaactaaaacagcatggtactggtacaaaaataggcacagagatcaatggaacagaatagagaactcaaaaattaagccacacacaaccaactgatttttgacaaagtcaacaaaaataaacaatggggaaggacatcctattcactaagtggtgctgggaaaactggctagccatgtgcagaagaatgaagaaactagaagaaaacctaggaaaaattcttctggacattgggctaggcagagaatttatgactaagaccacaaaaacaaatacaacaaaaccaaacatggacaattgggacttaagagcttctgcacagcaaaagaaacaattaacagagtaaagacaacctacagaataggagaaaatatttgcaactgtgcatcaattaaaggactaatattggccaggcgccatggctcacgcctgtaattccaacactttgggaggctgaggtgggtggatcacttgaagtcaggagttcgagaccagcctgcccaacatagcgaagccccacctcttctaaaaatacaaaaattagccaggtgtggtggtgggtgcctgtaatcccagctgcttgggaggctgaggcaggagaattgtttaaacctgggaggtggacattgcagtgtgccgcgatagtgtcactgtactccagcctggatgacagagcaagactctgtttcaaaaaaaataaaaataaaaaaggactaatattcagaatctataaggaacttaataagaaaaaaaccagcccctttaaaaagtgggcagtcttgctccaggatctatgctcataatgcctgtgctaggagaatgtcttaccacacatgcagccactaggagcataaatactagccagcatagaggggaatatcctgtttaatcagatttccctcattcattcatttcccaaaagtggattgagtcctcctgctcatcaggcactgcagttacagtagtgaataagacagaaaacccctgacctcaaggagctgatgttcctgataaacaaatgagcatataatatgacagtgtcaaaattttctaaggaagaaaaaaagtagccaaatgggaattaggtagtaatggggtggtttattgtttgctatttcaaacatggaagttagggagggcttcactgaggaagtgacactgagcagagacccacccgaaggaggggagggaacaagctgtgtggaaaaatacttcccacggagctcatgcaaagaccaagaggcaggacgtgtctggtgtgttggaggaacagcaaggaggaccatgtggctagaacagagtgagcaagggggagagagggaggagaggagaggagaagggagatggggctaggcttgcagtgccttgtgggcctcaggagacttgggcttttacctggagggaagtgggagccatggagggctgcagacagaggaggattgggacttgactcaggtgctcacaggcactctctggtggctgtagagaggatagactgggggtgggggtgagggtgggagttgggtgggaggcgggtaaccgggatggggtggaagcaaccacacaggtccaggggagcgatgatggagactgggccaaaaataatttttctctatcatgcatcatacaattgagtccaagggcttctgtaatgtctgaacttttaatttgtactcccgtgatttattgccaaacttgaagcctgctttccttgttgttatagcaaaatatatttatgcatcaaattttacaggaagccaagttttaatttacatatagaccttagtcctgggcccgtgatattgctcagacagacagtgtgggagagtaaaaaccatagttgtagaaaaatcagaaaacttctaagaggccttgagctaagatgcaggaggaggaaaggagttctgctgaaggagacagtgttggcaaaagatttggattcatgttaaaatgagaaattcagagaagatttccagggtgtggatctaggatcgggacctccagacccagggggatgatcctagctccacaccttgctatacagcactagctgagacagtgtattaagggagtggaggctgacytttgcaatcttccattgctgaccttccatgggccaggccctctgccagaattgggccctctactctccccattttacagttgggcaaactgacacacagtttggtgatgtcatatgaccaatgtcacaccagcttacatggttacttacaagtagcaaagccaggattccaacactgaggtggtcagacaccagtgtgtgctggtaactattaccctaggctgagggggggcagggaagcatttataagaatgcttttatagaaattcttcatttaaaaaccagcaggccaggtgtgattgcatgcacctgtagacccagctacttgggaggctgaggcagaaggatcacttgagcctgttgagtctgaagcttaagtgcatgatgattgtgcctgtgagtagtcactgcactccagcctgggcaacatggtaagaacccatctctaaaaacagtgtaaaaacagaccaggtgctgtggctcacgcctgtaatcccaacactttgggaggccgaggcaggcagatcacttgaggtcaggagtttgagaccagcctggtcaacgtggtgaaactccatctctacccaaaatacaaaaaattagttggatgtggtggcactggcttgtagtcccagatactcaggaggctgaggcacgagaattgcttgaacccaggaggcagtggttgcagtgagtggagtgccactgtactccagcctggggcacagagccagactcggtctcaaaaagcaaaacaaaacaaaacacacacacaactgaaaaataaagtaggctgggcgtggtggctcatgcctgtaatcccagcactttgggaggccaaggcggtggatcacctgaggtcaggagttcaagaccagcctggccaacttggtgaaaccctgtctctaataaacatacaaaaattagccaggcatggtggcgggtgcctgtaatcccagctacctgggaggctgaggcaggaaaatcacttgaacggaggcagaggttgcagtgagccaagattgcgccactgcactccagcctgggcgacagagggagaccccatctcaaaacacacacacacacacacacacacacacacacacacacacacacacacacaaccttcctgactcacacagaggaatcattgtctgctgggtgcataccctgccagacatttttctgcttttgacatggccagcattccttgatctcaatcactgcactctgctgccccctagtgaagcaactacgctactctctaacccccaatggtgaaggagccacactgcgtactagaccctggaatgccaccctgcccctggaagccaacaagagaaacagcccaaaggccaccactccagagcaaagggactttggcgtacgttgtcatgactgagcatcactcccttgggtatgcctgtggtccctgaagtgtagatgagcactgcgcattgattcgccttctggctctcgatgacctgctccagttgggtgtcagggatacttctgccaagttccatgaaatcatcccactgtggacagaaaagacaagcggaggatgagaaggcagtcgggagtcctctcacccagccagacctcgtcctatcagcttttcctaaagaatgatcctcagcaggtggaagggcttaggatgtgccagtcctggcacctcttacaaaagtcccaagatctctgcttccagttctgccacttcctcgcagcgtcaccaagccacttaagctccctgtgcctcagtttcctcatttgtaaaatgggaatgatgtcaggacgcaactccttgggttgttctaagcagtaagagagttaatatatgcaaagtgctcagaatagtagttggcaggtggtaagtgttctacggagttaggtattatttgttcgctgccttcccaaattccactccccactctacttcttagtcaccaattggatggggctgacttcacccacagatctggaagtcaaccctaattggctcaaactgttctatcagcctgggttatggtgattggatcaagtctggacatgtgacctcaagtggtccaatcataatgaagatgaagactttacctgggaattctgagacacagactgtgtatgtgaatgagtcaagatgtagctctargagctgctgaaccatctcaggactatgtgagaaagcaaggctggagcggagccaagaaatagagaaaggaaaatagagcctgggcacattctttgagcccctggttccagccatgcctgaaatccacgccctgaactgtagttgcatggtccaacagattatctttttgtttgtttgttgcttaagccatttggggtcagacttttgtcacttacgaccaaaggcatccttattgataattgatgcattgcctcactctggcaggtgaagaagctgaggctcaggggtggtagattacttgcccaaggcagattacttaaggcaagtgaagagaggagctagcattcaaacccaaggtctgactccagagcctgtgctcttaactatgacagaattcggtgccgcaaagtgaactcttgggttgtatcgactgagcatcacatgggatctgcagaaattctaccattgaacccccaacaaagcactggatgagggtgatgcgctgacttaaagatggaggcccctcggccaggcacggtggctcacacctgtaatcccagcactgggaggctgaggtgggcggatcacgaggtcaggagttcaagaccaacatggccagcatggtgaaaccccatctctactaaaaatacaaaaattagccgggtgtggtggcaggcgcctgtaatcccagctcctcaggatgctgaggcaggagaatcgcttgaaatggggaggtggagattgcagtgagccaagatcacgccactgcactccagcctgggcaacagagtgaaactccatctcaaaaaaaaaaaaaaaaggcccctcaaagtcctctacagatggccagtgttgcctgaaacctgcccagggtgatgctggcttcatctgagcaggcaaagccctttgcccagataatctgtaacaaggtagggcaagggtgagaggaagagcacacacaagccctctgggggaacctgtcctttctcagagatgcccctaggtctccctacaaagggtgttccttcaaaggccggtagaagacccccggcttccacagccacaaatgactggattgggatgggcaccagacccatgctggtccaatccaatcccctgtcttggagatctgggttggtcctcagtctgttgggcacacagatgccaagcatcacaactggcacagttcattgtcttactcggccattttccttcccaaatgtcacagtccactttctcagtctcattcgtttttgctcatttctgggtcctaaactaaatctttttctttctttctttcttttttcttttgagacaagagtcttgctctgtcacccaggctggagtgcaatggcgtgatctcagctcactgcaacctccacctcccaggttcaagtgatcctctttagcctcccgagtagcttggacaggcatgcaccaccacgcctggctgttttttttttttttttttgtattttattttatttatttgtttatttggagacagagtcttgctctgtcgcccaggctggagtgcagtggcgtgatctccgctcactgctcttggctcactgcaacctctgcctcttgggatcaagtgattctcctctctcagcctcctgagtagctgagactacaggtgcgtgccaccacgcccggctaatttttgtatttttagtagaggtggggtttcaccatattggtcaggatggtctcgaactcctgacctcaggttatccacccacctcggcttcccaaagtgctgggattacaggcatgagccaccacacccagcctttttttttttagatggagtctcgctctttcgccaggcttgagtgcagtggcactatctcggctcactgcaacctccgcttcccgggttcaagtgattcccctgcctcagcctcctgagcagctgggactacaggcgcatgccaccatgcccagctaattttttgtattttttagtagagacggggtttcaccatgttggccaggatggtctgtacctcctgacctcatgatctgcccgcctcagcctcccaaagtgctgggattacaggtgtgagccactgtgcttgggcgattattattattattattattattattattattattattattatttgtatttttagtagagacagggtttctccatgttggccaggctagtctcgaactcttgacctcaggttatttgtccacctcagcctcccaattacaggcatgagctactgtgcccagcctaaacagaatcttaaaatggtaggttctactctcccttgcagaggagtagatgcccttctatgtgactctcccctataaattagcgtcttcaaccaggggtgatactactccaccaccgcccaccctccccccaccagggtatattaggcagtgtctggagacacttttggttgtttcaagtgggaggcaggggatatattcctggcatccagtgagtggaggccagcaatgcagctcaacatcctacagggcgtcggacagctccttagagaattacctgccccaaatgtcaacagcaaggaggttgagaaaccctgctgtaagtgttattgctaacaaagtagtcttttaagttatccgagacttaagactgttgctgtagtggtcactttgaacctctaaaaagtttgtaattttttttttttttttttttttgagacggagtcttgctctgttgcccaggctggagtgcagtggcgcgatctcagctcactgcaagctccgcctcctgggttcacgccattctcctgtctcagcctcccgagtagctgggactacaggcgcccaccaccacgcctggataatttttttgtattttcaatagagacggggtttcaccgtgttagccaggatggtctcgatcttctgacctcgtgatccgcctgcctcggcctcccaaagtgctgggattacaggtgtgagccactggcgcccggcctttttttttttttttttttgagacagagtctcactctgttgccaggctggagtgcagtggtgtgatctcggctcactggaacctccgcctcccgggttcaagcgattctcctgcctcaacctcctgagtagctgggactacaggcacgtaccaccatgcccagctaatttttgtatttttagtagagacggtgtttcaccatgttgaccaggatggtctcgatctcctgagaagtctgcaattctaattggttgtcttagtcattgttataacaaattttggcttgggtataaataaaatatttaaacttaatgttgttagttttaacataattttcaactttttagtatattgtttaattatcttaatgttcttgggaaaaaattaataacaaaatgactgattttttttagccaccagttttggtggtgatttgttgcccagcagtaattagccagaacagacactgttcattaatcagtcccttcatgccagaagggaaaaatgcgtcccaaaggtcccgcctacgtccttttgctaggcccccacgcattgctcacctcccatttccctttgcaaaggccacatccacttccctttgcaaagccccacccactacatttatgaagccccacccacatccctttgcaaacccccacctaccacatttgtgaggccccattccatctctgcttacctcccactttctttgaaaggccacacccacttcccttgtaaggtcacaccccctccctctgctcacatttcacgtcctttgaaaggtcacacccactttcctcacaaggccccacccacttcctttcctcacctttcacttcctttgagagtccccacctacttcctttgagagttcccacccttgccaggtccgacctcctccctctgctcaccttccacttaggccacgcccacttttcttgcaaggccccgccctcccctttccccagtgcccacctcccacacttacagagtacaagttgttgttcttcttcattggyagtctgtactggatgatcgcttttaggggctctaggctgctctgtggaatctgaaaraaagttccctgtgggcttcatggcaacccagccctgggaaagactaaagctgggttagatgtcctaagtaagctctctccagcaactctagcctctttttttttttttgagacacagtcttgctctgtcgcccaggctggagtgcattggcccaatctcggctcactgcaacctccgcctcccgggttgaagccattctcccacctcagcctcctgagtatctgggattgcaggcatgtgccaccatgcccagctaatttttgtatttttagtagagccggggtttcaccgtattggccaggctggtctcgaactcctgaccccaggtgatccccccgcctcggcctcccaaagtgctgggattacaggcgtgagccactgtgcccagcctccagcctcttttcttcccctgcccacactataaaatgctgctattggtcttgactgactccaaatgacttggtttcaggactcctggattctttgtagtccatatcagtagcttccaacagtgtcggtagaggatgacaatagtctgcccgagacaacacatctctgaccaaattatgctacacagaattgtggatcttggttgatgagctaaaagaagtccctcatggctcttccttttccaggactttgcaccttgcagcccagatttagctaaccttttactcggagtcaggcaataaaaatccttcatgaagttggctggaacctggacaagtgcagagccctctacccatacctagcacggtaaggttcaggtgacctgcgggattcttttttcttttctttctttctttttttttttttttgagacggagtctcactcagtcacctaggctagagtgcagtggcgctatctcagctcactccaagctccgcctcctgggttcatgccattctcctgcctcagcctcccgagtagctgggactacaggcgcccgccaccatgcttggctaattttttgtagttttagtagagatggggtttcactgtgttagccaggatggtctcgatctcctgacctcgtgatccgcccacctcagcctcccaaagtgctgggattacaggcatgagccaccacgcccggcccctgcgagatttttatactctgttcatgccaaagaaagcggratggggtctctctatgacacttctagccaatccaatgaaaaagttacttgcaacatccattttgctaatcataaccacgcctctggcatgcattggagagaaaagatggcagaagcccgtatagcagctggacaggagttttccagagagaagaagaarcagacattcaaggagcctggggcaggcaacagcttgggatgtctgagggatacaaaaagtccaggatggccagagtggggacccaagagagtatgataggggagggggcatgaaagaatggtgaggcccagatcagcggagccttggaggcaaagatgaggagtttggagtttatttaactccaacagaaaaccgctagagaattagaggattataagcagaggaggatctgtgattactcccccaaataaagatctccaagtggagctgggcatccaatttgggagaagcatgtcaggaacctggttttgaatcttctagacctagcaactggaacaataaatcctccacagacttcaccttcaatgaaactaggagtcagaaataattcagatattgctttattcacttaatgctggacctgctagaaccaggacagaaatccacagcagccaggtgggtgtagargggaaggttgtgtatgtggcattttccagttatggaaaactcaaattaagccagcattcccagctggaagaaggaccccacccacccaccagcacccaccccatagtgtgttctgctaggaagaggacaaacaggtatgacatgagttttgggaaccaccgatgcatcacttaagaaagtaattttgtgagcagtggttcatgcctgtaatcccagcactttgggaggccaaggccattggatcacttgaggccaggagttcaagagcagtctggctaacatggcgaaatccagtcttgacaaaaaatgcaaaaattagcccggtgtggtggtgtgcacctgtagtcccagctacttgggagactgaagcatgagaatcacttgaacctgggaggtggaggttgcagtgagccaagatggcgccactgctctccagactggacgacaaagtgagacagtctcaaaaaaagaaaaaaacaaacaaaaaaagaaaagaaaagaaaaagaaaaaagaaaagaatttttaaaagctctaggccagaggtggaggtctgtccttcctgaaccaagtcaggaattaggagtcaaaggaagccaggcaggagaaagtgttgtatttcactgagtctagctaggatttcattgaatctggaaactgtacccaaatttcggagagaataaaatgtgagaaaacatatggccagtagtgatcagagaatgccatcaatgaaaagacacatctcgactccagagatgtgaaaaagtgaagaaatgagtgactcagagtcatgaaatcatgtattcaagaaacagtcacagtggtccttgagctgaaatgaacctagccatctaggctcacccctcccagggactcccctcctctccaggaccctcctgccaaaagctgatacagcaaactgcagctcattcaaacatgtaggaaatttaaagtttcgacaatagccatacaaagacactacaatgaaaaaaaaaaaaaaacgtaagacagcagctaaatttcactgtacacaaataaaactcactggataatttcaacacaatgcaaaagaaaattgtaaccaaggccaggtgcagtatctcatgcctgtaatcccagcactttgggagaccgaggcgggcagatcacgaggtcaggagatcgagaccatcctggctaacatggtgaaaccctgtctctactaaaaaaatacaaaaaattagctggacatggtggcaggcacctgtagtcccagctactcgggaggctgaggcaggagaatgacgtgaacctgggaggcagaggttgcagtgagctgagattgtgccactgcactccaacctgggcgacagagcgagactctgtctcaaaaaaaaaaaaagaaaaaaaaagaaaattgtaaccaaacattccaacataaaactaaaaatgtaatgaagcaaacacagctagaaaggaagaacacaaagcaaacatacaagcactcagggaagagacagcaggacactagaaaaaaatgaaacaggaagggatagaacttaggcaagaaatagaagagaacaacaaaagcatctagaaatgaagacaatgacaagaaatgaagaaaattatatagtagcatgggcttgaaatcatcacacttctaaaagaaaaaataattagcagtgggatgtatataaaataatacataaatatattaatacttttacttaagtgggggcttaaggttgggcatgggggctcatgcctataatcccagcactttgggaggctgaggcaggaagatcaattgaggccagaagttcaacagcagcctgggcaacatagcaagactctgtctctacaaaaaaaaaatggtttttgtttgtttgtttgttttgagacagggtctctctctgtcacccaggctggagtgcagtggctcagtcttggctcactgcaacctccacctcccaggttcaagcgatcctgccacctcagcctcagcctccccagtagctgggactacaggtgcatgccaccacacccggctaaattttgtattttttggtagagatggagtttcaccatgttggccacactggtctcaaactcctgacctcaggtgttctgcctgccttggcctcccaaagtgcccggattacaagcatgaaccaccacacctggcccaaaaaatgttttaaaagttagcccgggctcggggcggtggctcacgcctgtaatcccagcactttgggaggccaaggcgggcggatcacgaggtcaggagatcaagaccatcctggctaacacggtgaaaccccgtttctactaaaacatacaaaaaaattagccaggcgtgatggtgggcacttgtagtcccagctacttgggaggctgaggcaggagaatggcatgaacccaggaggcagagcttgcagtgagccgagttcagcccactgcactccagcttgggcgacagagcgagactctgtctcggaaaaaaaaaaagttagcctgacatggtggtacacgctcgtagtcccagctacttggaggactgaggcagaaggatcagttgagaccaggagttcaaggctacagtgagctacaatcacgacattgcactccagcctggggacagagtgagaccctgtctcgaaaaaaaaaaaaaaatggaggctgagtattaaactaagttaatatgaattggaaatcaaactcctctatttcagtctgcttctccaaaaatagcttcaccacatatactaatgaggtcatggaggactcgctgaacagatgcatggccctatcttatcattagaatttacctgggaaaaaaagaacacctgcccagagccctgaggtacccctgggtgactttggcaggcagtgctgggtaggggtttaccgaaaggattttctgtaactgttgatcattctcaaccagcaagatgttcactytggcatgagtgatgacatattgacaarcctcggcagagttggtggcataaataccaacacaaagacccctgggaaaagaaaacaaattcgtgtgtgcatccacacacaccttaaaggcagaatggtctggaaggtcaaaagagaggaaaggtttgcaggcaagttcttaagtttgcagccacagcaccagcttcccttcctccccaacttaacaatgatgaagacaacaaaaatgacaatgatgataagtgacagctcctatgatgtcactatgacaacaggtcatggaacacttagaacaccgcattttatagatgagaaaaacaggggcccagcagtgaagtcactcaagattacacagcaagtaggtgttagacctaggatctgaactcctgactcagcctctgttcccatcattcacagccttttgtgcttgcagggtgcatcctcttttgcttttaatttgcatttcccaatggataatgacattgagcacctttacatgtgccttttggctactttcctttgtggcatttctgttgaaatcttttgcccctttcaattttttttttttttgcctttttattactgagttacagaatttctttatctatcttagataccagtcctttgttagaaattcgagttttaagaatattttctccaagtatgcagtttgcctgttcaccatttttttttttttttttttgagacrgggtctagctcggtcacccaggctggcctgcagtggtgcaatctcagctcactgcaacctcaacctcctggattcaagcaattctcatgcctcagcctcctgagtagctgggattacaggtatgcaccaccacacctggctaatttttgtattttttgtagagaaggtgtttcaccatgttgcccaggctggtctcaaactcctggactccagtgacccacccacccctgcctcccaaagtgctgggattccaggcgtgagccaccatgttcgacaactgttcatcttgttggtgtcttttaataagcagaagtttttaatgctaataaagtcctatttggcaactttttctcttatgctttttgctctctgtrtcctgtctaagaaatctttgactacccccaggttgtgaaaccattccgtgcttttctttttctagaagctttagaatttaacttgcatgatttagtctgtaatccatctcaatttaatttttgcatatgatgtgaggtagggatcagggctgatttatttttccatacaaatatccagttggtccagcaccactgaactactctgctgcctttgttggaagccagtgaccatgtatgcatggagctatttctgggctctctgctctgttgatctagttgttgtgcttttaatatggcagggaatgaggcacattataattatttgagatggttactctcatcaccattcttaagcacatactatttgctaagcactgtgctaagggtttatgaagcatcctcttattgaatctttataacagccctgtgaggcatggagatgtgtgctttcctgctcattcatacagaatacaaaatagcagacaacccaagatttgaatttgggtctgatgtggcaccagagcccaatcactgcatgacactgtcttaccattcagtcctaaaatggggacagatctcttcattaaaatttattctgggctgggcacagtggctcacacctgtaatcccagcactttgggaggctgaggcaggtggattacctgaggtcaggagtttgagaccagcctggccaacatggagaaaccccatctttaccaaaaatacaaaatttagccagccatggtggcgcacgcctgtagtcccagctacttgggaggctgaggcaggagaatcacttgaacccgggaggcagatgttgcagtgagccaagatcacaccactgcactgcagcctgggcaacagagtgagactccacctctctctatatagataatataatatattatatattattatatgtattatatattatttattatatgtattatatattttatatatataataataattttctctctctctctctctctctctctctctctctctctctttttgagacggagttttgctcttgttgcccaagctggattgcaatggcatgatctcggctcactgcaacctctgcgtcccgggttcaagtgattctcctgcctcagccctccaagtagctgggattacaggcatgtgccactacgcctggctaattttktggggttttttttagtagagatagagtttctacatgctggtcaggctggtctcaaactcccgacctcaggtgttccactcccaaagtgttggaattacaggcatgagccactgcacccggcctcaaaatatatatatatttcaactcactgtaagacaggggtagtatatgctcataaaaatttggaaaatagaatataacatattagggtggtgttagtctcgatgatgagatataactaatgttaatatttatttctagtcaccaccctcaatttttttctctctcttttctcttttcttttccttccttccttcttttcttttcttttttcttttccttcttttcttttttcttttccttttcttttcttttcttttctttacttttattttccagacagggtctcactctgttgcccaggctggagtgcagtggtatgatcataattcactgcagtctcaacttcttgggctgaagccatcctcccacctctgcctcccaagtagttgggactacaggcacacaccaccatgcctggctaattttaaaaacacttttattttattttttagagacagaatcttgcgatgttgtccaggctggtcttgaactcttgggctaaggcagtcttcccatctcagcctcccaaagtgctgrgattacaggcatgagtcactgtgcccagccgctcaattttgtcatggccgtggctgctgctgctgctgtcgttgctgttgttattattaatcttgagtcgaacaaacgagttcagatctcagggtctttatccaaccacagcatgattctggggaagacacttaaccyctattggtcccagattatcgtcaccatcattattacttgggatcatgatggcacctacctcaaagggctaccatgagcagtcaatgatatcatataggtaagagtgaccagcaataattggtatattaatggttggtattttaaatttttttgttttgttttgtttttttgagatggagtctcgctctgtcgcccaggctggagtgcagtggcgcgatctcggctcactgcaggctcggcctcctgggttcacgccattctcctgcctcagcctcccrcgtagctgggactaacaggcacctgccaccacgcctggctgatttttttggtatttttagtagagatggggtttcagcatgttagccaggatggtctggatctcctgaccttgtgatccgcctgccttggcctcccacagtgctgggattacaggcgtgagccaccacacccggcctgatatttaaattttaagcatagttgtaaccatacagtgtataaagattttgatacctgctttgtcacctctgacatcaaaaatgcttaaaatgtgctcttcagagccatcatttcaaaatattaccgagaatcccatccagaaggcatctcatggtttaatccacagctgtgggacacttaggttgtccccgactttttgccatcactaataacacttccaagaagtatctttgtgcataagccaaaatatattcatgttttggttttgtttctttaagtaaaactcccaaaggtagaattacaagctcaagaagaaatcagtattttatttttacttttgtttttttcacgattacagcctgggcaacatagcaagaaaccatctctacaaaaaaaaaaaaaaaaaaattgggaggccgaggcgggtggatcatgaggtcaggagatcgagaccatcctggctaacaaggtgaaaccccgtctctactaaaaatacaaaaaattagccgggcgcggtggcgggcgcctgtagtcccagctactcgggagcctgaggcaggagaatggcgtgaacccgggaagcggagcttgcagtgagccgagattgcgccactgcagtccgcagtccggcctgggcgacagagcgagactccgtcctcaaaaaaaaaaaaaaaaaaaaaattagctgggtgtggtggtgtgtgctcatagtcccagttaccctggaggccgagttgggaggatcgcatgagcccaagacttcaaggctgcccactggctgtgtgagcctcagtttcctcatctgtagataggggatgataggacccacttcacattgctgtcgtgaggttttacaggatcatacacgtggagcacaatgcttctgcacataatcagaaacctctaaatgctatctacaattattattttgtctgcaaaaagttcttcagctgaagaaaatcgagaggtctgagactgctagtctaatgggtgttattgcgtatgacctgtgatcagaatgatttgttcgtgcatctatcctgcctgctaactagggcgttcatccaaaattcctgtttgcatctcacactggacaagcccaggggtcccaggcccagggtagcggctccttaaccctcaccatgaaccaagccaatgaccttaccyggctaggatggcaccaacagcagtgataaaccactctgcagagttaaaccccaggataccaactccgtggaaacgctccaarcccagctgggaaggaaaaarcaaacagaaaaacaaaacataaacacagagatgttatatcattaggatatgtgacgacagaatcaaaggtagtcacatggaggccaggcgcagtggctcacacctgtaatcctagcactttgggaggttgaggtgggagaattgcttgaggccagaagttcgagaccagcctgggcaacacagtgagacccctgtctttacaaaaaaagtggaaaagttcgccgggcatggtggtacacacttgtcgtcccggctacttgggtagctgaggcaggaggatcacttgagccctagagttcgaggctgcagtgagctatgattgcaccactgcactccatcctgggcaacagattgagaccctgtttcaaaacaaaacaaaagtagccacacggggtgggagacagcattgagcctaaaatctgaggtgtaatatttttaatttttatgactacgggaggtttgtttacctccctctacataacacaccatttattatttttatttttatgttttgtttcatttattgtggtaaaatatctataacatggattttaccattttcttttttttttttttttgagacagagtctcactctgttgccaaggctggagtccagcagtgcgatctcggctcactgcaacctccgtctcctgggttcaagcgattctcctgcctcagcctccgaagtagctggaattacagacacgcgccaccacgcctggctaatttttgtttttttagtagagtcagcgtttcaccatgttggccaggctggtctcgaacccctgacctcaagcaatcctcccgcctcagcctcccaaagtgctcacgcctgtaatccaccacacgcagcccgttttgaccatttttaagagtgtagtttagtggcattaaacacatccacatggttgtacaaccgtcaccactgttcatctctagaactttctcctctttctaaactgaaactctctgtataaaacactcactctctatccccttccccagcccctggcacctcccattctactttctgtctctatgagtctaacgactctagggacctcctaggaaagaaaccatacgggatttgcccttttgtgtctggcttatttcaccgagtatgatgtcctcaagattcatccatgttgtagcatgtgtcagaatttccttcctttttgtggctgaatcatattcccttgtatgggcggaccacatcgtgtttatccattcttccattgatggacacacgggctgcttccaccctctgtctcttgtgaataacgccgctatgaccctgagtctacaaataactcttcatgtctctggctttccttttttttttttttttttgktaaatatccaggagtgagactgctgaatcatatggcaattctctgtttacattttttctttttttagaaatcgccagacttttccacagtggcggcaccattttacatttccaccagcactgcacaagggttccagcttctccatatcctccccaacacgtgttgtgttttgctattttttaaagaatagctatcttgaaaggtgtgaatttattttattttattttattttattattattattttttgtctcgctctgtcacccaggctggagtgcagtgggtgatcatagctcactgcagcttcaacttcccaggctccagcaatcctcccgcctcaccctcccgagtagctgggactatgggcctgctccactgagtctaatttaaaaaaaattacaggcgtggtggctcacgcctgtaatcccagcactttgggaggccgaggtaggtggatctcttgaggccaggtgtggtggctcacgcctgtaatcccagcactttgggaggccgaggtgggtggatctcttgaggccaggtgtggtggctcacacctgtaatcccagcactttgggaggccaaggcacgtggatctcttcaggtcagaagttcgagaccagcctggcccacaagatgaaaccccgtctctactaaatatacaaaaaattagccgggcgtggcagcacctgcctgtagtcccagctacttgggaagctgaggcaggagaattgcttgaacctggaggctgaggctgcagtgagccaagatcgtgccactgcactccagcctgggcaacagagtgagactctgtctaaaaaaaaaaaaaaaaaaaaaagttgcacatgtaaaggtacagacttgttctgaatgtgggtgagaatgaaccaggaaactcagaaacaaaagtgagcatccttaggggaaaactccctctttgttctgggtactgccaaccaacgttgttggctcttttagtcatacgggatcacggctggcaatgatctgctgttcttgggggaaaaggaaccatttggaaggcatttgcctgctggtccttcagaatgagatgccaagtatttcagtaaccaaaaggctggctttattgtggacagagtgtgtttttattaatgcctagttacaccgactaatttctacttgggtctccaagtagttttgtttgtttttatttttggttttgtttctacttcggtctccaagttttgtttgtttgtttgttttttgagatggagtttcacccaggctggagtgcagtggcacaatctcggctcactgcaacctctgcctcccgggttcaagcgattctcctgcctcagcttcctgagtagctgggattacaggtgtgcaccaccacacctggctaatttttgtatttttagtgtagatggggtttcaccatgtgggccaggctggtctcaaactcttgacctcttgaccttgatccgcccaccttggcctcccaaagtgctgggattacaggcatgagccaccgtgctcagtcaggtgtccaagatttacgggaggagggggacctttaactccacggaactaagaacatggctaaaggagaccatctttcaggagagatgaactagccacagcaacatagtatgaaggtggggcccccaagaagaaacccagcccaagcacatggttctctttttttttttttttctttatgacaccatctcactctgttgcccagctagagtgcaatggtgcaatcacaggtcattgcagcctcgacctccgaggctcaagtgatcctcccacctcagcctcctgatagctgggactacaggcatgtgccactgcatctggctactttttaaatttttcattgagactggggtctcactatgttacccaggctggtcttgaactcctgggctcagtgatcctcctgcctcgatgtcccaaagcactaggattacagacatgagccactgaccccagccttgttccctctttcttttgcttcattcattctaggggtgactggcaaccatgccgtgaagacactcaagcaattctgtggagaaggccatggaatgaggagctgagacttcctgccaacaaccagtcatctaggtaagtaagcttggaagtgaagcctccagccccagttgagccttcagatgagatagccccagctgatagcttggctgcaacctcatgagagacctggagccagaagaacccaatttcaaagtagctcctaaattctcaatccacagaaactgtgagatgataaatgtttgtcatttcaagtcactatattttgggataatttgttatgcagcagcaactaacaaaaacatagagatagtatgttagggacaaatgcaagatgcagaaccatgggtgtagtaggctattatgtgtgtaaaaaatttgcatatataaaaatttcattttatatttatgcataatttatttcccaaaaggacacacaaaaaactgacaatggtgaccgcttccacagagaggaactgagtggctgaggctcatgaatcagagggaaattttcgccaattaacctttgtatcttttggtgccttgtgaattttgtaccacatgtatgtatgtstgttacctattcagaatgaatggttgaacaaaggagaatgaatgaatgaatcttaccttgatcaaggattttgcagccttccgacaagcctcatagtactggttgaaattcagaatttcccactttttgccattcttggatgcgagggctggataagttccaaatcggttgactgactctcgaaaaaattcagggatggtcatcggggtctcatggcctggtccgtgtttggatagcctcagaaggacttctccatctcgacaggtggtccacagcctgggagtaactgsaaatagtcaccagagttgggtggcaaatgtttttatttatttaataactttggacggggggcggttggtgtctttttggacctaaggtgctgagagttgaattaatccccttctagggtgaagttatgtggtcaacactggcaagacaagcttcctttctctttatttattttttcattccccgccccgccaaattttaatagtcaaaaggattgtataccaaatactttcttatccaacacctagattctacaactgctarcgttttaccatattttatcacacatctatcctgctgtctttgttatgtccattttttttttctttctttctttttttctggagacacggtcttgctctgtcagcaggctggagtgcactggcacaatcacagctcactgcaaccttgacctcctaggctcaagccatcctcccacctcagcctcccaaataactggaactacaggcaaacaccaccatgcctagctaatttattttttaatgttttgtagagatggggttctactgtgtttcygaggctgatctcaaactcctgggctcaaacaatcctcctcccttagtttctcaaagtgctgggattacaggcatgagccaccgcacctggccccatcttattttttttattattattttgttttgttttgtttttgtttttgagacggagctttgcttttcttgcccaggttggagtacaatggcacgatcttggctcactgcaacctccgcctcccgggttcaagcgtttttcctgcctcagcctcccgagtagctgggattacaggcatgcaccaccacgcctcgctaattttatatttttagtagagatggagtttctccatgttggtcaggckggtctcgaactcccgacttcaggtgatccgcccgccttggcctcccaaagtgctgggattacaggcatgagccaccgcgcctggcctattattattttttgagacggagtctcactcttttgcccaggctggagtgcagtggcgtgatcttggctcaccccgacctacacctcccaggttcaagcgattcttctgcctcaacctgccgagtagctgggattacaggcacccgccaccacatctggctaatttttgtatttttagtagagatggggtttcaccatgtagcccaggctggtctcgaactcctgacgtcaagtgayccacctgcctcggcctcccaaagtgccgggattacaggcatgagccaccgcgcctggctccatctgattttttgatgcatttccaagtgagccaaagctattcatccatttacccttaaacacccttgcatgtaaatcattaacaagagtcacatatttaatattatttacggagatttttttaaaggtaaaatgtacatgcagtggactatgtatgctttggccaatgaaacataagaagtgagttatgtgtgtcgttcatggggagaagatttaagacccggtgcataattccccatcgtccattgtcctgtcacaaaaatggtggagcaaatgtgaagaagtagcccctctcccccaatgccagacacacaacatgagtaagaaacacacttgtgttgtgttaagccattgaggttgttgagggggttgttgagggggttgcctgtcacagcgacatcacccagatcagccaaatggaactagcaaagggaccaattcaaaaccagttttggggtcctgtatctatcacttcttttggggatgagtaagggttgacactgagaaagaagagaacagggtttcctctggagacagttgttggtttgttgtgtgtttctcactaccacccagtaacgggcaagtgagagaaagtccaasagaccctcttggagaattgggtgtgtaaccttgmgtttgttcaactgaacctggtctactggggaggtggtagatggcaatggtagagtaggcagctgtgttggaaggaaattgcacatccacctatgatgggatgctactttttttttttttttttgagatggagtcttgctctatctccaggctggagtgcagtggcacaatctcagttcactgcagcctccgcctcctgggatcatgcgagctcaccgcaacctccacctcctgggatcatgtgattcccctgcctcagcctctcaagtagcggggattacaggtgggcaccaccacacccagctaatttttgtatttttagtagagatgagtttcaccatgttggctaagatggtctcgatctcctcaccttgtgatccgcctgcctcggcttcccaaagtgctgggattacaggcatgagccaccgcgcccggccgggatgctactttttccccttgactagacatgggcctcatagatgggcttctaaaggctcttggcttggkgccagtagtaggacccaaggactggaratgtatgttcagatagtcatcaacagacagcaggctggttcatgcctgtaatcccaacacttttgggaggccgacgccggcagatcacttgaggtcaggagttcgagaccagcctggccaacatagtgaaacctcgtctctattaaaaatacaaaatttagtcaggcgtggttggagggcacctgtaattccagctactcaggaggctgaggcaggagaatcacttgaacccgggaggcagaggttgcagtgagccaagattgtgccactgcacttcagcctgggtgacagagtgagactctgtctcaaagaaaaaaaaagaaaaagaaaaaaacaacaaaaaaaacagacactggtatgactgatatattaattagctaggactgcaataacaaagtgccccagaccgggtgtctgaaacaacagaaatgtattgtctcacaattctggaggccacaagtctgagatcaaggtgcaggcagcactggttccttctgaggctgtgggagagaatctgaccaatgactttctcctagctgcggttgccggcaatccttgacattccttggcttgtaggtgcatcactgcaaactctgcttcgatcctcacatgacattctccgtgtgtgcaggttcgtctctatttcctccttttataaagacactggtcacattggattgggacctaacctcatgacgtcattttaactaattacttcagtaggctgggtgcagtggcttgtgcctgtaattccagcactttgggaggccgaggcaggtggatcacttcaaatcagaagttcgagaccatcctcgctaacatggcgaaaccctgtatctactaaaaatacaaaaattagccaggcgtggtggcacgcgcctgttgtcccagctactctggaggctgaggcaggagaatcgcttgaacccgggaggtggagattgcagtgagccaagatcgcaccactgcactccagcctgggcaacagagcgagactccatctcaaaaaccaaacaaacaaactaactaacaaaaaaacaacaacaaaaccaaacaacaacaaaaaaaccaaattacttcaatgatcctattcccaaacaaggttacattctgagcacctgggggttaggacttccacaaaggaattggagatgcacaattaatctcataacaacttacaacaagggaagcctagttcatacaggcccccttcaaccccactttcccgagctaatcagctctgggagtcagcaccagctcacaaagaaaccacctggggagatgggggtgatgaggagaagagcatctaggaactcaaagagcaccttatcatgccttcctgaccccagcctgaagcaggggggagtggagatgctttaaattggacaaaaacatggaggtgtcacctggacacttgtgggatattttaatgactgtagtgggttacatggtgaacctccaaaattcatgtccacccagaatttcagactgtgaccgtatttggaaacagggtttttgtaggtggatttagtgaaggatcttgagatgacatcatggcatcatcttggatttagggtgatccctaaatccaatgactggtgtttgttttygtttttgtttttgtttttgtttttttgagacagagtctcactctgttgcccaggctggaatgcagtggtgtgatcttggctcactgcaacctcactacccacaccttcatctcagtaatctggcctccagaattgtgagacaatacatttctgctgtttcagacacccactttggggcgctttgttaaaaaaaaaaaattagccaggcacggtggtgcatgmctgtaatgccagctgtttgggtggccgaggcatgagaatcgcttgagcctgggaggcagaggttgcaataagttgagactcactataatccaggcatgtgccaccacacctggctaatttttgtagttttaagagagacagggttttgtcatgttggccaggctggtcttgaattcctggcctcaagcaatctgcccgcctcagcttcccaaagtgctgaaactacagatgtgaactgtgcccggccagttttctagggatttagatgaatattccaccctttggacccataaaggtagcatccccaaactcctttgtgtgtgatgctatctttcaagcacgcctgcactccctctccttgaatgtgtactttgcaatgcaagtacttttatttgccataaacctcagtactttcactattttttttttttttttgagacagagtctcgctctgtcacccaggctggagtgcagtggcatgatctcggctcactgcaagctctacctcccgggttcacgccattctcctgcctcagcctcctgaatagctgggactataggcacccgccaccacacctggctaattttttgtattttttagtagagacggggtttcaccatcttagtcaggatggtctcgatctcctgacctcgtgatccgccygtctcggcctcccacagtgctgggattacgggtgtgagccaccgcacccggcccactttcactattttctgacttgtttcttgaattcactctcgatggtgtcaagagcctggataatggctgggttcgaggtcccaccggcgtttggggacctcccccaacccactggtatcagagctgtctatgatgtcaccatgtcccttgactttagctctgacagtaaaatgattatagcctaatgttaataaatcactatgatcatatccgcaccctatctacatggatgattcctgggtactttatccactcgggctcaccaacctgacagggaggtgctgttatcaatgcccccatcattcagatatgcaaatgaggcctccaaagagcaagtgacttgcccagtgtcacatcaccagtagagcagagctctgaattatgtgaacaacttgccctgctacctcaacaacctatcaagaatagaaaataggccctaggctgggcacggtggcccacacctgtaattccagcactttgggaggccaaggtgggaggattgctagagcccaggagttcaagaccagcctggggaacatagcgaaaccctgtctctacaaaaaaaatacagagctgggcatggtggtgtgcacctgtagtcccagctacttggagggctgaggcaggaggatcacttgagcctggaaggtcaaggctgcagtgagctatgactgcaccactgcactccagcctgggtgacagagcaagaccctgtctcaaaacaaaagggtggggggtcggggtcagcagggtcaggcaaggaatggctacatctttctagatccagactcctctgcaaagagcctttgtggaatcaatgtgccactctctctcccacgtactctttagtgcaatataccttctgttttattcatgtctacttcaagatctttagctccttcttgagtctttggggttccagtcattccaggtgtgcagaaaccatgctccacagcactgcaaagcaaaaaagcagggagtttaacaggattggcaaaggggctgtaggkatgaggccaactcttccatccactggtcatgtctgcctagaatcctaggatccattggtcatgcctgtcctgggcctgggaggagaggagagtggccggcatgccagataatagagcatttgtaaaacccagagggtattcaatctgtgagtttacagaagagtctcttaaattgttagaatataaagtctgggtctatacacaattctgtgggtgagaaaatattttgaagcctcccaggggaaagaaactctcatgggaccacacatttatcttctcttaaaggtaatattaacatgaaaactcaaagggcctaaaggagaaacaggataagtcttgctacataaaatttttaaattttccacatggccaagaataccacaaacaaaaatcaagagatcaacaacaaattggggaaagatgtggacaatacatccaaagtataaaagcttgatttccctcatatgtaaagaaccctgaggaattaatcagaaaaagaccaaaacccaatgggaaagygggcaaaggacatgaatagataattatctgaaactgaaaaatgacttttaaaaagaagtaaacatgctcaaactcagtcctatgagaaatacaacagaaaatatgatgcagttttcacctttcaggttaagtaagatcaaaaaagctgacaatattgtctattatgaaaatgtgggaaaacaggtgctctcattcatygtggtaaaaatcaatgccayctctttcgaaaacacttatcagtaatcagacttaagatcacatggggtttggtttggttttgtcgcctaggctggagtgcagtgacacaatctcggctcactgcagcctccacctcccaggttcaagcaattctcgtgcctcagcctccggagtagcagggattacaggccaccgtacccagctaatttttaaaaatattcttttagtagaaacaagggttcaccacattagccaggttggtttcgaactcccaagctcaagtgatccgcccgcctcagcctctcaaagtgctggcattacaggcgtaagccattgcgcctggccgagatcacatggtctttaacccatcagtagcggacaggattccggggctaccctgggtttttgcatagtcattaattggactctactgtttgagggctttggagtggtgtttgtaccaccactccttcaggttgtttaattctcagtgtgttaattcctttttttttttttttgagacggagtcttgctctgtcgcccaggctggagtgcagtggctcgatctcggctcactgcaagctccaccttctgggttcacgccattctcctgcctcagcctcctgagtagctgggaccacaggtgcccaccaccacgcccagctaattttttttgtatttttagtagagactgggtttcaccgtgtttgccaggatggtctcgatctcctgacctcgtgatctgcccgcctcggcctcccaaagtactgggatgacaggcgtgagccaccgcacccagcctatgcctggctaattttgtatttttagtagagacagagtttctccatgttggtcaggctggtctcagactcccgacctcaggtgatctgcctgcctcggcctcccaaagtgctgggattacaggtgtgagccaccacacctggcctaaaatcacaaattctaaatataaatttattccaatcaaaaatgtctccagatattgtcaactttgtcccctgggggaagtggaggccaaattgttggtcaacatttattgaaactgatttttctagtggctttcagggaggaaaattgtacgattttgttcatgataaagagcgtgcttgayacaagaatcaagcagttgttctggattctagatttgcagtaatgttttatgaactctaaaagtttccatcagtgagtgcaggaacacagcaggtgaaaacttgagtaaaccctctggtgaatgaagccctgtaacatgcacgtgattcttacaccagcaaaaactgattttgtatttcagtgaaaacaggtggctaaaaggccatgttctaagttgaacttgaggccaggtgcggtggctcacgcctgtaatcccagcactttggaaggccgaggctggcagatcacctaaggtcaggagttcaagaccagtctggccaacatggtgaaaccctgtctctattaaaaatacaaaaaaaattagccaggcatggtggcagacacctgtagttccaactacttgggaggtcgagtcaggagaatcccttgaacctgggaggtgaaggttgyagtgagccaagatagcaccattggactccagcctgggtgacagagcaaaactgtatctcaaaaaaaaaaaaataagtttaattttaaaaataagtaaagtgaacttgaatgagcctacggagtttacacacacaaagtagatcaatcagcaggacaaagcgagcagcccaaaacagcagatccagaccaagctacagatatgcatgaaaaacatgcacggagtgtgcggcccaagaagaaatgaggaggaagcccaaggcccctctggagcagctggatctggcccagaacctcaaagtcatccttaattcacctttgacttgcttccttccctccctccttcctccctttgcttcttccctttcttccctcctttctacttccttcttccctccccttccttcctttttcccattctcctacccttcctctctccctcccttccttctttcctcccttcgttcttcccctctcttccttcctccctccgtccctgccttttctttcttccttcttcccttcccttcctttctttcttcctccccttccttccttccttcctccctctctcttccctctttccttccctccctcccttctttccttccttcctccctccctccctccccttccttccttttcctccttcctctttccctccctccctcccccttcccccttcccctctctctctccctctctcttcctagcacattgactcattagctaattccatcagctcagccttcaaaatgggatccactctctccgcctgcctggacctaagcttcctcccaggagcctgagaggtcctggtcacgtgagaggcccatcacccaggcgcattgtgggttctgctagatctcaattcaaacaagatgtgcacgaggccgccaagaactccaccactgactgtgtctcagacgacatgaagaaatgaagaggggatgtttacttccttaaagtatgataattgctttggggtgaagttagagaaaggaatccttgttgccaaaggattcatgcatgaaagaacacactgtctggtgcttgctttaaaactacccacgaggagtggggtgacacagaaatgaccaaggctgactttaagttggagccgagtsataggtagytgggggcttatgttatgatcagctctacttttgtgtttgaaactttccacgataaaagtgtttacaaataaaaatgaatgccaagcayggtggctcatgcctgtaatcccagtgctttgggaggccgaggcgggtggatcacctgaggtcaggagttcgagaccagcctggccatggttcacacggtgaaaccctgtctctactaaaaacacaaaaattagccaggcacggcggcaggcacctgtaatcccagctactcaggaggttgaggtgggagaattgcttgaacccaagaggcagaggttgcagtgagcagagatctcgccctgcaccccagcctgggagataagagtgaaactccatctcaaaaataaataaataaataaatacataaatacataaataaataaataaaaataaaaaagtgaaatgctggcccaaccctgtctctcctctgcctgcagccctccatggctcccacctccctccaggtaaaagcgcaagttctccccacggtccacaaggccctgcacctccctgtgctctcctccttcctccctccccctcctcactctgctgcagccacgtgggcctcctcactgttcttccaactcaccaggtgcagtccttccttggggccttcgtacgggctgtgccctctgcctggaactctcttcccctcagatagctgggactacagaagcatgccactacgcctggctaatttatttttatttttatttttgtagagctgggggcctcgctatattgcccaggccggtcttgaactcctggcctcaagcaagccccccccccccccaaccccgccacctcggcctcccaaagtgctgggatttgcaggtgtgagccaccacaccaggcccctcttttctttataaattgcccatcttcaggtattactttatggcaatgcaaaatgggcaaataaaattagtatccggagtatgaaaagaactctggatttaaaagacaaatgtaaacaacccagtgttttatgatgaaaaatgtaaacaggcagttcacaaaaaaggagcctggaaagggctacaaatcctggacaagatgctcagtagctttggtcatcagggaactgcacgttaaaaatcacacgatcggccgggtgcggaggctcacacctgtgatcccagcactttgggaggccgtggcaggtggatcacttgagctcaggagttctctacagaggacttgtaagttactagtaatattcgatttcacgaagtgaaaagggcacacagatatttatcgttattcattaaatcgtacagatatgctttgtgttattttatatgcattatatgtttcacaattttaaaaggccatgtagggttcagatgtggtgactcacacctgtaatcccagcactttgggaggctgagtcgggyggatcgcttgaggccaggagttcgagaccagcctggctggcatggtgaaaccccatctctactaaaaatacaaaaattagctgggcatggtggcgcgtgcctrtaatcccagcactttgagaggtcgaggcgggtggatcacctgaggtcagaagttcaagaccagcctggctggtatggcgaaaccccatctctactaaaaatayaaaaattaggccgagtatggcggctcacgcctgtaatcccagcactttgggaggccaaggcgggtggatcacgaggtcaggagattgagactatcctggctaatgtggtgaaaccccatctctactaaaaaatacaaaaaattagccgggcatggtggcaggcacctgtagtcccagctactcrggaggctgaggcaggagaatggtgtgaacctgggaggcgaagcttgcagtgagccgagattgcgcctgggcaacagagcaagactctgtctcaaaaaaaaaaaaaaaattagctggacatggtggcaggcgcctgtaatctcagctacttgggaggttgaggtgggagtatcacttgagcctgggaggcagaggttgcagtgagctgagatcgtgccactgcactatagcctgggcaaaagagtgagaccctgtctcaaaaaaaaaagaaaagaaaacgcatgcccttctcccataccactggcacctgtcactcttcaagaggtgtggttctggccatctggcaaggcacctggagctgggacatctggtcactcaggtgttttcttcttcctgcaaagacagtcaacaggtagcccctcctggaaacctgaacatgagctgccccttcccagcccccgtcaccctctccgtccagccaggatgatggtggtggtgggaggcaggaggatgggtggtttccctccacaacaggccttctaccccattcaaccttccagaacgttccatcccagccacctcttgtgacatcactggctgcccctgcctccgcaccccacccccacccctaggggaagctgcttccaggacagggagattgctcttttcatgcatcattcatttattcatgcatgcatgcacttctgcgttgcattcgtgacgtttttatgaagccatgaccctaatggcagggattgtgctggatgctggagacataaagatgaacaaagccagatgaggcctgttcaagaaaataagaggaggcctagaatcacacaaacaaatgcaaacttaccattgtgaagagagccccaaggcatgttgagggcttgatcaaaggatcccgcccaggcagggagtctgggagtggtttctttcttttctttcgttttttgagacgggagtcttgctctgtcacccaggctggagtgcaatggtgcgatctcagttcactgcaacgtctgcctcccaggttcaagcgattctcctgcctcagcctcccgagtagctgggattacaggcgcccgccaccacgcccggctaatcttttgtatttttagtacagacggggtttcgccatgttggccaggctggtctcaaactcctgaccttgtgatccgcccgccttggcctcccaaagtgctgagatgacaggcgtgagccaccgcgcctggcctgggagtggtttcttgagctgggatctgaagtatgcctggatgttattcctgccctcgtgactttctcttacgctgcctgtcttcatgtgtttacagcggcctcccccttctcgttctctgctttagtcactgctaacaatgtccactaccaggcacagtggcttgtgcctggaatcccagcactttgggaggccaagtccgtagcatcacttgaggccaggagttcaaaaccagcctgggcaatgtagtaagaccccgtctctacagaaaaatttaaaaaattagccgggcgtggtggtgcgcaagtgtaaccacagctagtagggaggctgaggtggggggattgtttgagcccaggagttccaggctgcagtgagctgtgatggtaccatggcactccagccaggcctacagagcaagaccttgtctcaaaacaaaaaagacaaaacagtgccaggtgcagcacatactagatgctcagtaaataaagatgtagcaacagaatcttgtgctgtgccaggagaaaaggacaaggagtgttcctttgtctccagggccttttgtgtgtgtgtgtgagagagagagagagacggagtttggctcttgttgcccagactggagtgcaatagcgtgatcttggctcactgcaacctctgcctcccgggttcaagcgattctcctgcctcagcctcccaagtagctgaggttacaggcatgcaccaccactcccgactaattttctgtatttttagtagagatgggttttcaccatgttggccaggctggtctccacctcgtggcctcaggtgatccacccgcctcaaccttccatggtgctgggattacaggtgtagccaccgcacctggccaccagggccttcttaatgtttcacaaatatctactctgcagagcacctgggcagctgtgccaggacagccagtgtccaccaatgtccattcagcccttcttccccagagctctcacctaaagagagagaatgtttcccaggccccctgactgcatggcgtgtccatgtgactacatcctgccctgtgggatgtgggcataagtggtgggggccatgcctggtcatgcctataaaggaaaggaggtgacacccttccccaaccccccatccagtagaatcctgggatcaggagcagcctccttggacaggggtgaagctggaggggagggagcaggtcaagaggtccccaacaggagggaagggacctctgtctctaaagacagttgagccactttgctggtgccagacagatttatgcaagttgcacacacgctcgctcgctcgctcagacactctcacgtgcacaggtactcacacacaaacagaccttcccatgggcacacaatcacaagcacactcacatacactcacactcataacatgctcccacaatcacacctgttcacacaattcaaatactttcatacagacacaaactggcaggcacgcacacacacacatgcgcacacacagtcacatgtactatcagacacatgattacatgcatgcacactcatccacagtcatgcacatatgcagtcacacacgtgcctcattatagagacatcccatttcgtacacatgtacactgtcagacacacaatgtgtgacagtcacacagtcacattgctcaggccctcatacgcacaattacatgcacacacacatatggacacacatggtcacacacaccctcatacagacacacaattacacacccacactcacacattcacatacatatgcacacacwtgctcacactctcaccctcrtacagacacaattatatatatgcacacatatgcacgcactgctcacacacaccctcatatggacacatgactacatatattcattcccacacacgtatatgcacacacatggttacacagcctcatacagacacacaattatatacgcacacccactcacatatgcacacacattctcacactcacacaccctcatacagacacacaattatatacgcaaacccactcacatatgcacacacattctcactcacacaccctcatacacacacaattatatacagcacacccattcacatatgcacacacattctcacactcacacaccctcatacagacacacagttacatacactcacacacgtatgcactgatagacacctaattatacacataatcataatctcacacacacactcctgtgtgccctcatgcagacaaatacacacaggcacacacaccctcatgcagatacagtcacatatacagtcacatgtcctcacacctgcacacacttgcacaccccacatcctcacacaccctcagatacccaattacatatatacactcgcacacacatgcacacacttgctcagactcacacacaacctcatacacacagttacatacacacatacattatgacacacatatgcactcatatacactctcatacagacacacacagacacatacacatactcccaaagatatgcacacacaccctcatgctgacacacggttgcacatacagtcaccatacattcacacacacatactcgtacagacacagttacatacacacacagtatggcacacacttacacatatgcactcacatacaccttcatatagatgcacaatcacacgtgcacttaattcacacaggcacacatacacagttacatacagtatgacacacacgtatacactcacatacaccttcatatagacgcacagtcacacatgtgcacataattacacgcatgcacatgtacacagttacatagagtatgacacacacatatgcactcacaccttcatagagacacataatcacatacacacacaccctctcaccgtggaaaagtaaatctccttggagaaaatctgtccatagctatcccagacaagtttcagcaaggatgaggacgctgctgtgctacccagatcttttcagtgatgaaagatgtgtgccccagcctctaggaatgttgctggaagcagacctctgctgtccaccccttcaggtcagcatctgccaaatggcacgtcctcatccagggtcttgttcccttccccgggccaccaacatctgtatggaggcataaaatctcgggcccctctccccaaatctcaggacaactcagggaccatcccagctacagagctgggggcagctggacttctcatgctctctctctctctctgtgtctctctgtctcccccaatcctgtttgtttcccttcccttccctttcccttccaccagtatccatcccaagggtgggtcccctctaaacaaaccttttgcaagctcagttcctctcatctgcttcctaataagctctctgcaacaaaagcagtcgttgtatgccactaaaatccctccacttaccttctcttacctttatcccacctgccccaggtaacataataacgtggactctcatccccacaccccctcccctgaggactctgagctgaccactctcccagagtcttggctgttagtctttgagctcgactccccactcccttccacgggttcttcctacacagacccgaagctgagcctgtctgggcagctgaggacacttcctccacacagagggatgaagttcattccaggccatggctcacattttaatggagaaagaactgaagatagaaatggcattgcataaaggcaacagctgcggaaagagaagcattcatttggcaacattcatctcctaatccagcagaccccaggagactctctcttcccccagagccaagggcaaagtgaactcaagggtaactctgtaaaagaatccaggtgtttacactggaaatggggaaggggggactcagctggcagtgtgagtcacctgtgcgtcctccactggtgcctctctgggcaagggggcggttggatcctcactacttggctggttctaggatcctccactggggcacctgctttcacctcatgtgccatcttgtcttaagagtcaagaacagtgggagctctcagccaacctccaagacacccaattaaccaamtcatccatgaacccaaggtctatcccccacagaggatgcatggtcgctggttcatacggaaaccttgcagggttgctctgaaatgtacatgcatccacttccataccaggctcgctgtgtgctcactgagtgcaagctgtgtattcccaaacctgtttatgccagttgtgcttcttattctaacaactatattttattttattttattttattattctattttcttttcttttatttttaattttattttttgagacagagtctcgctctgttgcccaggctggagtgcaatggcgccatcacggctcactgcaacctctgcctcccaggttcaagtgattctcctgcctcagcctcccgagtagctgggattacaggcgccaaccaccacaccaggctaatttttgtatgtttagtagagacggggtttcactatgttggccaggctagcctcgaactcctgacctcaggtgatccacccacctcggcctcccaaagtggtgggattacaggcatgagccaccgcgccagaccctaacaacataatttgatcaaatattatacgcctcaatgtaatacagcagcaaaaaaaaaaaaagtcattgtttctaagtctcaaaagtccagctgataaaagagtgatgaattacgcatggacgaggtgacttactaactcagggaaaaaattggaaattgaccctgtccaatatagtagctacaagcctatgtgagtatttaaattaaaatttttatgactatacacttaaaaatggttaaggtagtaagtttagtgttatacgtattttgccatattaaaaataaaaatagagctgggtgtggtggctcacacctgtcatcccagcactttgggaggcagaggtgggagttcaagtaaggagttcgagaccagcctggccaacatggtgaaaccccatctttaccaaaaatacaaaaaaattagttgggcatggtggcaagtacctgtaatcccaactactcgggaggctgaggcaggaaaattgcttgaacctgggaggcagaggctgcagtgagccgagatcgagccactgcattccagcctgggcaacagagcaagactctgtctcaaaaaaaaaaaaaaaaacttaataaaatatattcacatatccaatggattactcatgggaggaatttcaacacccctcttttgtttactgctttatttatttagacaaagtcttgctctgtcacccaggctagagtgcaatggtacgatctcagctcactgcannnnnnnnnnnnnnnnnnnnnnnnnnnnnnnnnnnnnnnnnnnnnnnnnnnnnnnnnnnnnnnnnnnnnnnnnnnnnnnnnnnnnnnnnnnnnnnnnnnnnnnnnnnnnnnnnnnnnnnnnnnnnnnnnnnnnnnnnnnnnnnnnnnnnnnnnnnnnnnnnnnnnnnnnnnnnnnnnnnnnnnnnnnnnnnnnnnnnnnnnnnnnnnnnnnnnnnnnnnnnnnnnnnnnnnnnnnnnnnnnnnnnnnnnnnnnnnnnnnnnnnnnnnnnnnnnnnnnnnnnnnnnnnnnnnnnnnnnnnnnnnnnnnnnnnnnnnnnnnnnnnnnnnnnnnnnnnnnnnnnnnnnnnnnnnnnnnnnnnnnnnnnnnnnnnnnnnnnnnnnnnnnnnnnnnnnnnnnnnnnnnnnnnnnnnnnnnnnnnnnnnnnnnnnnncctgtctctactaaaaatgcaaaaattagccgggcgtggtgacgtgtgcctgtagtcccagctacttgggaggctgaggcaggagaattgcttgaacccggcaggtggaggttgcagtgagccgagatcacgccactgcactccagcctgggcgacagagcgagaatccatctcagaaaaaaaaaaaaaaaaaaaaaagctccaacaacatgagatacagagtcaaagcctcatatgtaactgttacaaaccaaactggatcaatttgcctatatgcaagggaacatcaaccagcaaagcactatgtttttgcagtgagaaaggtttaatgtgagccaattggcaagaaaatgggagaaaacactcaaatctgtctctttgaactgggagttggggcaggttttatagtcacagggtaatgaggcattatctgattggctcttgcgatggtgtgatgccagggctcgagctgattggatactggatcattgccatgtggcgtctgtttcttaattcaattctgctcctttgtctgagcacttaggttccacctgtggttgactttttagctcatctggacatgttctgattatgtagcttgcaacctggggtccatggcaactggaagacaactcacaactttgttacataaaaattgaactggattggtccgatattattacataatgaactctcaccgttgggtgaggtcaaattgctataataggtatttgtctttttctcattctttttcacagctgtatagtattctatttcacagctgggatactatacagctgtaaaaaagaattagatgacatatctataatatatccctcatagataacatagctacgatatagccctttctcattctttttcacagctgtatagtattccagcatgcaagaaattactcaaaaacttagcagcttaaaacattgataatcactcatcatctctcgtggtttttgtaggtcagaaattcagacagggcacatctgggacagcttgaagtcatgatgtgctggagctggcatgtatcaaccgcatgagtcagagccaattgcatgcatctcttctcagcttcacattcagtggtatcacatctgtaccttgaaatcagccacagtgggagtatttacaccacaggaattggcaaacactgcaaatcagcgccccatgccactcaagagccagttattaaatatttatcagaacataactgctttaaagaattatttaaaattctcaacaatataaagggacattttattattaaatccttagggatggtcccaccaaaatcccatatacagtaatattagcagactccaaatgtacttagatttgctaaaattctcaaatgcattttttttttagagacagaatctcactccattgcccaggcccagtggtgtgatcatagctcagtgtagccttgaattcctgggctcaagcaatcctcccacctcagcctcctgagtagctagaactacaggtgtgcaccaccatgcggggcttattattttatttttttgtagaggtagagttgtccagcctggtctggaactcctggcctcaagtgagcctcctgcctcagcctccaaagtgttgagattgcagccatgaaccatgacagccagcctcaaatgcttttccaataacacacagacacaagccctgaaatttatatcattgagttactgaatacatatatgtgcctggatttccctagcaaaaattgggaagaaaacatttactttccttttccaggcagggtgagttaaatggtatgtctgcagctgcgttgccaggggtccgtggcttttcaaaagtgggtgtccctactggcaaaagtggatacgggggtctgcatgttccgtggcagcttccaggaagaatgagaagtggataagagtggatggtgcaggtctagaagcaagaaaggtctgaactaaattggttgtcacttgctgtataagtgagccaaagacagtgtctttctatcagccctatctcatttatttctttacagcaggcaggcagggacctctcagctcaaagcccaccagcaccaagctcaaattctcacacaatccattgctataaatattgcacaaataagcatatgtttagtcatttagagcccacctgctttgcataccccataaaattgcacccaacaacacctattaatcacagagaagaaaaatcttacagccataagaaaccccaaattattgttgcctttcagagttctatgatgcagactctccccaccttgctactcaatgacatcacctagacacttaagccctgcctctaactctcctctgtcccaggagttcctctggaaggagtcctgctggaagggacattccccgcatgcaaacctatctaagtgccgtgcagtaaagcttgttatgcaatactgccatcttatggtcctgttttgttttgttttttttgagctgccccatcaggaatcaatgatgtcataagtcatggctcctgaaattgcaattttcttgtgtgtgtgtgtgtgtgtgtaagcaaaattaggccaggcatggtggctcacacctgtaattccagcattttggaaggccaacacggggggatcgcttgaggtcaagagtttgaggccagcctgagcaacatagtgagacctcatctctcctaaaaatttgaaaattaacgcgatgtggtgacacgtacctgtagtcccagctacttgggaggctgaagcgggaagattgtttgatcccaggagtttgaggttgcagtgagctgtgattgcaccactgcactctagcctgggcaacagagagagaccctatctcagtttaaaaaataaaatacaataagttttaacgaattaatttttgttatgtcttgtggtctttaaatgacacacatttgacagaatgcagtggacattgacagtaccaagtaacactgctatggccgagaacaggagtggccaggtggcatctgaaaagctctagttccttggtgtgtcatctacagccatgagcagcctcatccaaggctcctgtcggggtggccagtatggagtgaggtctggaggtgtgtctttgatccctacgtctgacactcgctgtccatcacgaacatcctgtgtcactgtggatccaggtactggaagatactgaaggagtccatgttccaggtgccaaggtaaggccatgaagnnnnnnnnnnnnnnnnnnnnagaagaccagaagggggctcctggtagctgcagctccagataaagcctccaagtccccatcttcacgtgtatcagattcttctgtcaatttgcagctggtatgctcttttagcagggatcaagccagcaactggatgactcctccaacaatgcatgcaaattagagcatcattatcatttgaagtgcctgatgggaaaacactcaactggattcaaaaagccatttacatcattacaacaatttttgaaacttatatttgttaatgaataaagaagttggggtccttagacataatttcacctgttataattttttaaaggcttgtagaaaatggtttgaagtttcttaccacttgcttgtgcacgtgacgtttcttgccaattgtgtctattaaaaatttgaggggccgggcacagtggctcatgcctgtaatcccaacactttgggaggccgaggtaggcagatcacccaaggtcaggagttcaagaccaacatggcgaacatggtgaaaccctgtctctactaaaaatacaaaaattagacgggagtggtgatggatgcctgtaatcccagctactcggtaggctgaagcaggagaatcacttgaaactgggaggcagaggttgcagtgagccaagatctcaccactgcactccagcctggaagacagagcaagactctgtctcaaaaaaaattttttttaaaaaatattagaagcaaaccaaatgtctgtcaacaaaagaataaacctataaatagtgatatatttttataatgaaataccactcagattttttttaaaagaatgaacaactgatgcattcaacaatatgaatgaacttcacagatataatatgctaaagaagccagaaaaggccaggcgcggtggctgacgcctgtaatcccagcactttgggaggttgaggcaggtggatcacttgaggtcaggagttcaagacaagccttgccaacatggtgaaactccatctctactaaaaatacaaaaaattagctgggcatggtggtgtgcacctgtagtcccagctacttgggaggctgaggcaggagaatcgcttgaaccaggagatggtgattgcagtgagccaagatcgcgcccctgcactccagcctgggtgacttgtctaaaaaattaaaataaaagagtaagcaaaatacacgtggtggtagaagtcagaaaaatggggtagaggtattaactggaaaaggacaagagagaaccttctggggagaaggaaatgttccataccttgatccaggtgctggtggtaaggattcacacacacacacacacacacacacacacacacacacacacacacacgtaaaaagtcacacatatgtaaacaattaagaattatgcactttgacatctgtaagttacatctcaatttgtttttgttttgttttgttttgagacagggtgtcactctgttgtttagaatggagtgcagtggcacaattgtcgttcactacagcctcaacctccctcagctcaggtgatcctcccacctcagcctcccaaagtctgggattacgggcatgagccacagtgcccagcctcctgtgtctattaaaacagtcataataataaaagcggtacagttcacacagtgatgtccttaaaataatgcagatgaagccaatgtcgtttataaagatgggaactagtcgcaaagcccccactgtccctttcgttagattgccttgccaagttgtaaggtaaatctttgtatcaatcctgaaaagttggtaacattcaggcacagaacctagaccagtcaacgcactatgttaccgttacagcttagtcgtaattaagctaaacattgaacattctcttttttgagttcttattattttgagacagggtcttgctctgttgcctatcatacaatggcccaatctccgctcactacaatctcaacctccccaggctcaagcaattctttcacctcagcctcccagatagctgagactataggtccgcatcgccatgcccagttgatttgattgattgattgattgattgattgattgagatggaatcttgctgtgtcacccaggctggagagcagtggtgcaatctcagtgcactgcaacctctgcctcctggattcaagcgattctcctgccgcagcctcccgagtagctgggattacaggcgcctgccagcacgcctggctaatttttgtatttttagtagagacagggtttcaccatgttggccaggctggtctcaaactcctggcctcaagtgatccacccgcctcagcctcccaaagtactgggattacaagtgtgagccactgtgcccagcctgattttatttatgtttttgtagagatgaagtctcgctttgttggccagactggtctcaaactcctggcctcaaacgatcgtcctgccttggtctcccagagtgcgggtattacaggcaggagccactgtgcccgcccagaattgaacatttttatctctattttcataaagaaggcagctagtatgcttgacagcttctgttactgaaattttttgtttctctgttttttataaacctctttccttctcattcctcaccgtgtgtttttttttttttttttttttcctgaaacaggatcttgctctgtcgcccaggcttgagtgcactggcacgatctcagctcactgcagcctccacctcccgagttcaagagatttttgtgcctcagcctcccgagtagatgggattaacaggcgccgccaccacacgggctaatttttttttttttttttgagatggagtctcactctgctgcccaggctggagtgcagtggcgccatctcagctcactgcaagctctgcctcccgggttcacgccattctcctgcctcagcctccagagtaactgggactacaggcgcccaccgccacacccggctaattttttgtatttttagtacagacagggtttcaccatgtttgccaggatggtcttggtctcctgacctcgtgatccacccgcctcagcttcccaaagtgctgggattacaggcgtgagtcaccatgcccggcctaattttttgtttttagtagagatggggtttttgccatgttggctaggctggtctcgaactcctgacctcaagtgattcacccacctgggcctcccaaagtgctgggattacaagcgtgagccaccatgcccggttaccccttttattttctctccaaattcttttttcctccttctatttctctttttcctctttcctttccttcttccttgcctttgaagttaatatggaacacgggcatgcacagccattctatccttctgcttcccggttgcctagaagtggctaatacctttggctgaaaaaaaaaattattttttcttttaaatgtgcttggtgtgtattcagcttgccccttcgatggctgttcggggtcacaggtatttgctatggaaatgattccgtgttccagagaaatgtggcagcggatggccagaaagccgcgagacaaataaaagatctctgcggtactcaggtgctttttacacaaaatccgctattcagaagccccatcattatggaaattgtccttttatgctactcttgaaaggatcagatgctcagactcaggtttgtaccaagtaagaggctgttaaaactacgcatcagtgcgtgaatggcctgtaaagttctaatagagctggttaattaacagtcatcagttaaataaaaacaatcaattagggagaagctcgtctgggagaaaaaaaaatagttttaacaatcaccaagggtaaattctctcaagcagacctggaaatgtcccaggaaggaggcagtttttgtaccgttctcatacccaaactcgttttcactggccctgtggttttactaattctttccttgtaagcgtgctgtctaaatgtttttgtttgaggcagggaagggtggctcatgattgtaatctcagaactttgggaggctgaggccagaggataacttgagcgcaggagtttgagaccagcctgggcaggatggcaatacctcgtctcttaaaatttttttttttttaaattagctgggtttggtggtggcaggtgcctgtagtcccagctactct

SEQ ID NO: 97093 - DNA, 29814 bp, Homo sapiens
acacccagccagcgaaatggctatttctagtgggagagccaatatccaaagattcgtttgtattcattacagttattaccaaatatattggcccactttcttcctgaggttttctttatttccttgtcaatgttcagtgccatgctggcacctggggctggagggcaggtatatgaagcaagatagagtccattatttttcaaaaagccttcaatatgtgagaaggacaggatttgctccttaaagaatttgaaaacatattggctgggtgcggcggcccatgcctgtaatgctagcactttgggaggcccaggcaggtgcttcacctgaggtcaggagtttgagaccagcctggccaacgtggtgaaaccctgtctctactaaaaatacaaaaattagccaggcatggtggcaggcgcctataatcccagctacttgggaggctgaggcaggagaattgcttgaacccgggaggcggaggttgcagtgagctgagattgcaccactgcactccagcctgggcgaaagagtgaaactcctcaaagaaaaacaaaacaaaaagaatttgaaaacattatatcaataaaacagataatgggaaagtgttcttctgagcttgcagcaaaagtattagagcagaagctatatggctgatcatcagggaagtagtagagcatttggataacagtcagaaaatgggggtatttgactgcaataagaacccttctaacacaggttatttaggagtcccatagataatttcccagtttcaattgcatataattggttataaaaagagattatggccaggtgcggtggctcatgcttgtaatcccagcactttgggaggccaaggtgagtggatcacttgaggtcaggagtttgagaccagcctggccaacaaggtgaaacgccgtctctactaaaaatacaaaaaaaattagctgggtgtgatggcgggcgcctgtagtcccagcttctcaggaggctgaggcaggagaatcactggaacctgggagatggaggttacagtgaaccaagattgcaccactgcactccagcctgagcagcagagcgagactccgtctcaaaaacaaaacaaaacagagattataattaattacataactgagagagagaaatgttacaaatttagtagcatgggtgattctgcttgcattctactctacaatgtacctgcttttttttcaagagtctcatttcctagttaatttgctgagagagagttctatgtaaattgtaaaattattcttagtatataaattatattcagcatactattaaatacattagttgtttatacatacacattacaatatcattttttgggtgatttctgggatttccaatgaccagccccagtttttcacctaaaggctgacgttagaacttaacctctgcagcccaggcgcggtggctcatgcctgtaatcccagcactttctgaggccaaggtgggtgtatcactaggtcaggagttcaaggccagcttggccaagatggtgaaaccgcatctctactaaagatacaaaataattagccaggtgtggtggcaggcgcctgtaaccccagctactcgggaggctaaggcagagaattgcttgaacctgggaggcggaggttgtggtgagctgagatcgcgccactgcactccagcctgggcaacacagggagactctgtctcaaaaaaaaaaaaaaaaaaaaaaaaaagaacttaacctctgcataagagatttctatgggagcacagtgacagaatatgggatgtgcaaggatggattcagtgaattgatgaagccaaactgggacatgaaggaggatggcatctggagagctgtagaggggtgaaggtggtccatgtgggtgtgtagggattgtgtactttcgatgtccaaagatcctgctgctctccctgcctcttttcctcacgtttctctaccactttcccccacagaacgtgaagctcttggagcaatttgtctgcgcccacacgggtatcatcttctatgctccatacacaggttagcccatcatccctgcaccaccagagagcttttccttgtggcatgccttgtttatgtagttggccaataggtatttgttcagtggctcctgcttatagcctaaaaggtctggctgaaccttttggaaatcttggcttgctgggggctaaagtaattaaatgtggacaaaagaaaacaacaaatacagccaggcgtggtggctcatgcctgtaatcccagcactttgggaggccgaggcggctggatcacctgaggttgggagttcgagaccagcctgaccaacatggagaaaccctgtggtgatgcatgcctgtaatcccagctactcaggaggcggaggcaggagagtcgcttgaacccaggaggcacaggttgtggtgagccaacattgcgccattgcactccagcctgggcatcaagtgaagctccatctcaaaaaaaaaaaaggaaaaagaaaaaaacaagtacttctgtaagcaaactatctaaatgtagtttttaattgataaacagtgattaattcctttctatagggtcttttaacttttacaaaagacttctcacaaattgtcacataagttattttatatcattgtcaattggattagattttccaaacttggaatcgtaaatttaacaattcagaattatatttattccctaactacagtcacagggcaaatctggcccactgtcacgtccatttgttttcatattttctgcaattgcttccatgctacaatggcagagttgagtagctgagacagagaccacaggacctgcagagtttaaaatatttactatatgactctagacagaaaaattttgctaacccctgctctgaagcaagacaaatttgcagagaataattttttgttgttttttttttttgagacgaagtttcactcttgttgcccaggctggagtgcaatggtgcaatcttgcctcaccacaacctctgcctcccaagttcaagtgattctcctgcctcagccccctgagtagctgggattgcaggcacatgccaccatgtccggcaaatagagatggggtttctccatgttggtcaggctggtctcgaactccggatctcaggtgatccagctgccttggccttccaaagtgctgggatgacaggcatgagccaccgtgcccggcagagactaatctttgtttttgttttttttgggggggtgtgggtggggggatgaaatctcatttactctgtcacccaaggctggagtgcagtggcatgatcttggctcactgccgtctccacctcctgggttcaagcagttctcctgcctcagcctcccaagtagctgggattacaggcacgtgccactgtgcctggctaattttttttgtatttttagtagagacagggtttcaccattttggccagtctggtcttgaactcctgacctcaagtgatcctcccacctaagcctcccaaaatgctgggattataggcatgagccaccgtgcctggccttgcagagaataatctgaattcaccattgttgggggtggcagtacaatcagtgttcagtttgtcaagagtttcttatagtcaagctgtaaaggctgaagggactattattgttactctctcagattgccttccccaactctgaaatctcttttccctttattgaatctttgtggattgttcaactcaaccctctaattaaccacacttgcccattaaattgtgttctccctgtcttggaggttttaccattaaatggcttctctatagtggctagaccctcctaaatctttatcccagctctccaaaagatgggggagattctttcctttgggcagatggggaaactgaggtccatggaggggtcaggggaaaggggtcattaggtaaagccaatccttcccaatctacccctctgtcaccatatggaagcagttgtgttctattatttactgtgccttaaagaacaagatatttttctccccacaggagtctgtgtgaagcagcacaagcggttgacccaggccatccagaaagccagggatcatggtgagcatgagacggggcacacagcagttttgtttaggtataaggaagatgacttagggctagaaaatggatataaatgctcacacctgttcaagatggtagcacccagcatgttcttcctgacgttacattgtcccctgtcctttctcctgagtgtcttactttatcattgtcctgtctccttgttctttgtctttccatccttttccctcctattttacaactgctggtctcaatgccttaggaagttctttatataaatgtctggccctggactacatggcactgctgcataagttagtaaaaagtatacccctctgctagggcagatgcagcttcatagtccttgttcagcactgcacagctttgtaagcaagagccccagcagtatgtcagcccacacttgccctctgggccggtcacctgtttgcagtatacaacatgcataaatgtacctggtggctctgactggtccttccctttataatcctttttcttacttcatctaaaccaccctcctcattgcctcttaaatttcttttcttttttaatcccttaggtctcctcatttaccacatcccccaggttgaaccacgggaccttgacttcagtacctctcatggggctgtgagtgctactccgccagcccccaccctggtctcaggtgacccctggtacccatggtacaactggaaacagccaccggagagagaactgtctcgccttcgccggctttaccagggtcatctccaagaagagagtggccccccacctgagtcaatgcccaagatgccccctagaacaccagcggaagcctcctccactgggcagacaggccctcagagtgctctgtaggagctgtagactgggaagagaggccaggcgtggtggctcactcctgtaatcccagcactttgggaagccaaggtgggctgatcacttgatcccaggagtttgagaccagcctgggcaccatggtgaaacctcgtctttaccaaaaaatacaaaaattagctgggtgtggtggtgcacacctgtagtctcaactattggggaggctaaggtaggatcacttgatcccaggaggcggaggttgcagtgagttgcagtcacacccctgcactccagcctgggtgacagctagaccctgtctcaaaaaaaaaaaaaaagactgggaagagagctagagggactaggagataatgtgtatgtaggtttatgtgatgggatatcaccctgaagagttgtgtcttttgtggccagtgacaaatccaggaaatgaatgttgctgatagggataaatcttgaggctgagggcgggtggtacagatgtgtatgggaaaccccaacccctatatattgtaaatagatgggctgggctaaacattgttgccgtttcatacttctaccaactcagcttttacacaataaagctctactgtctctggtttgctttgggctgtttccgatgaatgccattagcggggggtgggctgagtgatggtcttttcatataagcaattgggtgatgctgtggggagataagtggtcaggcttaagccagccttgcctgtgacgcctgggactagaagccggggatgggcagctgtgccactctgtcaagatgccttgtgggcccccactccacagcatggcccactgttcactgaggggataaaaggttggacagtgagacactgggccaaggaagactacgttgccatggcactcactgccgtgggatgcagggatggaaaggagtggcactgctaggggcacagctggtttggcaagaaaaacgggggccctgtcagttgccaggacgctagggggcaaggtctacaggcggggctcctggaaataaagactccgagaggcggtgcggcgagaggaggggcggaagtgacgtcgtgtggggcgggtccgaccgcgcacaatgggccatggagttcccgttcgatgtggacgcgctgttcccggagcggatcacggtgctggaccagcacctgaggcccccagcccgccgacccggaaccacaacgccggcccggtgacagctcaaacccaccctctggcccttttctcccggttcctctccaaacctggtycaggcaccacgcccccttctcactgactagtgatcgccccttttgatgtccaggcctgcctttttggtgacctctgaccctgggcctagtgggattgatcagcgcttggatctgtgacctttcaccccgggcccaaaatgtcccaatcaaaggatgtggttgacctggcctttctgcttcctcacaataaccttaagggaggagggagtgtgccaccttgaaaggtgtgacagaagtttgggtttcagaagggtggggtgggaaatcagattggaagactcccaggcaaaggcagggagccttcagtgttaaacctgggttggagttgtggcccaggttcccaggactgactgcctaggacccgctaatttagtgagtatctgactctttatttcttctctttctctagtgttgatctacagcagcaaattatgaccattatagatgaactgggcaaggcttctgccaaggtactggagagtttttagatggagtaaagggaggacctctgtggggatggtatataagggaggcctgggtccttcggagagacttgcagaaagtctgacttaatcttccctgcaggcccagaatctttccgctcctatcactagtgcatcaaggatgcagagtaaccgccatgttgtttatattctcaaagacagttcagcccgaccgtgagtgccacatgctcttccatcccatacttaattccttccytcctcagcccttcccccatctttgactatctcttgcagatagataccactagcctgttcattattttccccgtcctacagggctggaaaaggagccattattggtttcatcaaagttggatacaagaagctctttgtactggtgagtgttattggatrctaggagttcgtataccttggtttctgagaacaaaagtgctggaggttagggggcagcagagatgccggggttcctaaaacatttttattgtttctctcttaggatgatcgtgaggctcataatgaggtagaaccactttgcatcctggacttttacatccatgagtctgtgcaacgccatggccatgggcgagaactcttccagtatatgttgcaggtatcactgacctcttcactggttcatccaaactaggggctcctttgccctgagcccttccagaagccctgcctcccaccccccatgttcccatgtcattctattcccttcccaggcttctggcttcctgttggcatgctttccccatacttcctcctaccctgagtctccttttccctgcagaaggagcgagtggaaccgcaccaactggcrattgaccgaccctcacagaagctgctgaaattcctgaataagcactacaatctggagaccacagtcccacaggttagaggtttcagagaatagatccccactgagcattcccattgaatttatttgttatttatggcaaagaagtagtgacttatttcctatcacataggtttcattttctacaaccaggctctttctttctcttgtggtaccatctctcatcctgtagtgacttctttctcatctattttgatttttttttttgagatggagtctcgccatgctgcccaggctggagtacagtggcgcaatctcagctcactgcaacctccacttcctggtttcaagcgattctcctgcttcagcctcctgagtagctgggactacaggcacccaccaccacacccagctaatttttatatctttagtggagacggagttacaccatactggccaggctggtctcaaactcctgaccttgtgatctgcccgccttggcctcccaaaatgctgggattacaggtgtgagccaccgcatctgactttttttttttttttttcaaagcagagtctcctgctgttgcccaagctggagtgctatggcaggatcttggctcactgcagcccaaccttctgggctcaagcgatactcctcccttagcctcctgagtagctgagactacaggcatgcaccaccatgcctggctaattttttattttttgtagagatgaggtctcactatgttgcactgggtggtcttgaactcctggctcaagagatccacctgcctcagcctcccaaagtgctgggattataggcgtgagccactgtacccagacttattttgattctttaccacaagttgtttcctacacctaatttttctttttttttttttttgtgagatgtagccttgctccatcgtccaggctggattgcagtggcacgatcacagctcactgcaacctctgcctccggggttcaagtgattcttgtgcctcagcctcctgagtagtagggattacaggcatgcaccatcatgcccagctaatttttgtatttttagtagagatggagtttcaccatgttggacagactggtcctgaactcatggcctcaagtgatgtgcccacctcagcctcccaaaagtgctgggattacaggtgtgagccaccgcacacaacccttatgcctaattttyttttgagacagagtcgctctgtcacccaggctggagtgcagtggcacgatctcagctcactgcaagctccgcctcccaggttcacggcattctcctgcctcagcctcccgagtagctgggactacaggtgcccaccaccatacccagctaattttttgtatttttagtagagatggggtttcaccgtgttagccaggatggtctagatctcctgaccttgtgatctgcccgcctcggcctcccaaagtgctgggattacaggcgtgagccaccgtgcccgaccccttatgactaattttcaacccaaacatagccagctcattttcacctccttgttttcacatagttcattactcatctggtcagtcagtatttattaagggtccagaataatatgcattccctgtcctcatggagctttggcctaatatagggaaggaagtcttgtttataactaagtgcagcaaaatgttactaatgctacccattcatccaataaacattgagtgcctggcagtgttctgggcactaggaatggtttactcaatgaaacagacaacagcctgggcaacatagcgaaactctgtctctacaaaaaatacaaaaaaaaattagccaggcgtggtggcacgagcctgtagtcccagctacttgggaggctgaaatgggagaatcgcttgagcctgggaggcagaggttgcagtgagccaagatcgcgccactgcattatagcctgggcaacagagagagaccctgtctccaaaaatgaaaacaaaaacagaaaaaaaggccaggtgcggtgcggtggcccatgcccgtaatcccagcactttgggaggctgacgtgggcgaatcacttgaggtcaggagtttgagaccagcctggtcaacatggtaaaaccccgtctctattaaaaatacaaaaattagcggggcatgatggtgggtacctgtaatcccagctacccaggaggctgaggcaggagaatcacttgaacccgggaggcagaggttgcagtgaaccaagattgcaccactgcactccagcctgagcgacagagtgaggactccatctcaaaaaagaaaaagaaaaagggccaggcatggtggctcatgcctgtaatccccacactttgggaggccaaggcaggaggatcacctgatatcaggagttcgagatcagcatgtggaacatagtgaaaccctgtctctactaaaaatataaaaattaactgggcatgatggcgtgcgcctgtaatcccagctactcgggaggctgaggcaggagaattgcttgaaccccggaggcagaggttacagtgagccgaggtcctgctacagcactccaccctgggggacgaagcgagactcttgtctcrgaacaaaaaaaaaaaacagaaaaagaagggaacagacaaaagtccctgtcttagtggtggagcttatattctagctggagagacaaacaaacataataaacaatatggttaataagtgctctggaaaaatgagagcaagtaagggtttgggagtactcaagtaaggtggggatgggagtatgtgggattgcaggttgaaaggggatcatcactgagaaagtgtcatttgagcaataactgaaaggaagtaagagtaaaaactggccgggcacggtggctcatgcctgtaatcccagcactttgggaggccgaggcgcgcggatcacgaggtcaggagatctagaccatcctggctaacatggtgaaaccctgtctccactaaaaaaaatacaaaaaaattagctgggtgcctgtagtcccagctactcgggaggctgaggcaggagaatggcgtgaacccgggaggcagagcttgcagtgagccgagatcgcgccactgcactccagcctgggtgacagagcgagactccatctcaaaaaaaaagaataaaaaccaaggctgggcgtggtgacttacatctgcaatcctagtacttagggaggccgaggtgggtggatcacttgagcccaggagttcgagactagcctaggcaacatggtgaaaccccatctctacaaaaaacacwaaaattagccaggtgtagtggcacgcacctgtggtcccagctacttgggggtctgaggcaggaggattgcttaagcccaggaggtcgaagctgcagtgagccgagatggtaccactgcactgcagcctgggtaacaacgtgagactgtctcaaaacaaacaaacaaaaaaaaagagtaagagccaagaaatatctggagagagagcatcccagacagaaggtaccaccagtgtatggccgtgaggtgggagtgtgcctgaaagagcaaattggctgtgtccagagcagcatgagtcagcrgaggagtatggtaggagatgagaccagagaggtaatgcrgaggaggggcmttataggctactgcaaagactggcttttattttaagtaaaaaataagatcaggccaggggtggcgactcacacctgtaatcccagcactttgggaggccgaggtaggtggatcacctgaggtctctactgaaaataccaaaattagctgggtgtgatggcaggtgcctgtaatcccagctgtttgggagtytgaggcaggagaatcactagaaccgggaggcggaggttgcagtgagcygctgaaattgtaccactgcactcctgcctgggcgacagagcaagactccttcttaaaaaaaaaaaaaaaaaaaaatagcgccaggtgtggtatctcattcctgtaatcccagcattttgggaggcccaggcaggtggatcacaaggtcaggagttcgagaccagcctggccatatggtgaaaccccatctctactaaaaatacaaaaattagccgggtgtggtggcgggcacctgtagccccagctacttgggaggctgagatagaagaatcgcttgaacctgggaggcagaggttgcagtgagctgagatcgcactactgcactccagcctggataacagaacgagactccatcaaagaaaaaagaaaaagatcattttggctgtgatcttgattttttcctttttaacaagatcactttggctgttaagaacaggcaatagccgggcacagtggctcacacctgtaatcctagcactttgggaggccgaggcaggtggattgcctgaggacttcaagaccagtctggctaacatggtgaaaccccatctctactaaaaatagaaaaaaaaattagccaggtgtggtggtgctcgcctgtaatcccagctactcgggagactgaggcaggggaattgcttgaatcagggaggtagaggttgcagtgagctgagattgtgccactgcactgcactctagcctggtgacagagtaagaccccatatcaaaaaaaaaaaaaaaatggaaacggcaataagggagccagagtagaagcaagtagactaattaggcagcaacaatcctggcgaaaaatggtggtggctcagaccaaggtggtagcagtagtgatggtaaagagtggtcaaattttaaatattttgaaggtaaagcaagtaagatttcctgacagattgtatgtggagaaagaggactttaggacaatgccaaagcctgagcagctggaagaatgaagttgctttaactgagatggtaggtagaccagctttgggggaaatactaggagtacatttttaatatgttaattggagatgtctgtgatatgtccaggtttgagyagacagttggatacttccctggagatcagggaggaggtttggggaggagagttttcagcatacatctggtatctaaagccaacagacaggatgcgatcaccatagaaagattatagatagagaagctgcccctttgggccctctttaagaagtgaggacccccaactggctgctctgaaaagccatctttgcattgttcctggttcggtgtcctgctcaccacagccacctccgccatgcacttcctctgctgcctcagagtctggcagcttaatcgacatagtccccaaactctcactttcttcttaatcccttgcatcggatcaccgctgtgccccaccatgtcagaggcagttgtggacacaagctccgtgatcaccaccaaggacttcaaggagaagttgtggaggaggcagaaagtggaagagacgcccatgctaacgggaacgctaatgaggaaaatggggagcaggaggctgacaacgaggtagatgaagaagaggaacagggtggggagaaagaggagaaggaagaggaaggtgatggtgaagaaaagaacggagatgaaaacgaagcagctgaggcggtatggacaaatgggcagctgatgatgatgaagatgacgatgttgataccaagcagcagaaggccagtgaggatgattagacagcaaaaaaagaaaagttaaactttaaattaaggccaccgtgacctattcaccctccacttcccatctcagaatctaaacatggtygccctcgagaggcctgcttgccctccacagacagtgccactgcagatgacaggcactcaccaccacccaacccaaaccagagaatttgcaacagaggaggaaaaaagaaccaaaacttccaaggtcttgctcttttaaaagtactttaaaaaggaagtttgtttgtattttttatttacattttatatttttgtacatattgttagggtcattttttttttctttgagacggagtctagctctgtcgccaggctcaagtgcagtggtgcsatcttggctcaccgcaagctccacctcctgggttcaagtgattctcctgcctcagcctcctgagtagctgggattacaggcgcccgccaccacacccagctaatttttgtatttttagcagagacaggctttcaccaggttggccaggatggtttctatctcctgaccttgtgatccacctacctcggcctcccaaagtgctcgaattacaggcgtgagccaccggcgcccagccaggttcagtcatttttaatgatctcagatgaccaagccagcctttggagggttctctgtcttacttctgactttacttgtggtgtgatcatattcattataatctcaaaggaggaaaaaaaaaaaaaaaaaaaccttgtttaaaaaaaaaaaaaaagcctgggcgcggtggctcgcgcctgtaatcccagcactttgggaggccgaggtgggtggatcacgaggtcagaagatcgagaccatcctggctaacatggtgaaaccccctgtctactaaaaatacaaaaaattagccaggcgtggtggcgggagcctgtagtcccagctacttgggaggctgaggcaggagaatggcgtgaacccgggaggcagagcttgcagtgagccaagattgtgccactgcactccagcctgggcaacagagcgagactacatctcaaaaacaacaacaacaacaaaaagtctcgttctgagcattccagtagcttctttagtgtatgtagttagttgtaccataagtagttggtttgtgtgagatggttaaaaaggccaaagataaaatgtttcatttatttgccttttttgtctatgaaatggctgcttatttatttaggcctatttgatgtatgtgtgaaacaatattgtgcaacaataaacccaaattttattttgctgagttgttctaacagcaacaaaaagaagttaaggaagagaagaagaccagcaaatgcaaccacagagtgactagtgaagtagatgaaaactgaggccgggtgtggtggctcacacctgtaatcccagcactttgggaggccgagtcgggtggatcacctgaggtcaggagttcaagaccaacatggtgaaaccccatctctacaaaaaatacaaaattagccaggcgaggtggctcatgcctgtaatcccagctacttgggaggctgaggcaggacaatcacttgaatctgggaggtggaggttgcagtaagccgagatcatgccattgcactccagcctgggcaacaaagcgaaactccatctcaaaaaaaaaaaaaaagaaaagaaaactgaaaagtaaggtgacctcaaaggccactgaagaaagtgtttccaggaggaaggaatggtttacttggtcaaatgctgctgatcaaggagcaaagaggtctgagaagttaccattggatttatctgcgttaggccattggtgatcttaatgagcagttttggtgcagcggtgtttggaagcctggatgcagtgggtcttgtagactgagaagctaggaacacagcaagaataagctactcttttaaatcctgctttaatgggaatagaaatagagcaagagctggagagtgaagtggatcaaaagagttgatcttttgcagatgggagaacaaatagcattagaatgattcagtagagagaaaatattattatgtcagagaaagtggggagaactgttgaagtgatgtcattgaatgggcggcgggggcgttgagatttggttgacaagttagccttggataggaacatggacagttaatccaytgtaacatgatttgatagatgtgattacagaggaggcataaggacatggatttgagtgctatcttgggctgggggttgggtaaagaaagatgacatgtctaatcttgaaaggcaagtgtttgtcaggtggacaaaaggctaaagtgcatttcatgtagaggaacaggcatgagcaaaggcagaaaggtattaaaccacctttcaggccaggcgtggtggctcacacctgtaatcccagcactttgggaggccaaggtaggcggatcacaaggtcaggagatcgagaccatcctggctaacacggtaaaaccccgtctctactaaaaatacaaaaaaaattagctgggcgtggtggcaggcgcctgtagtcccagctaatcaggaggctgaggcaggagaatggcgtgaacccaggaggcggagcttgcagtgagcccagatcatgccactgcactccagcctgggcgacagagcaagacactgtctcaaaaaaaataaataaataaataaaaataaaccacctttcaggacactacaagcagtgtggtgtggttggagtgctgggcatgtgcttgttggggggtgggggtgatgaggatgggctggtagacattacaacaaggtcaaggcaagggataggcagggtcttcctacagtatatttttccattaagaggcaacagagagcagtggaaggagcacagtttttttttgtttgtttgtttgtattttgagatggagtctcagtctgtcgcccaggctggagtgcagtggcacaatctcagctcactggaacctctgcctcctgagtccaagcaattctcttgcctcagcctcctgagtagctgggattagaggcgcccaccaccacacctggctaatttttgtgttgatgaggtttcaccatgttggccagacgtctcgaacttctgacctcaagtgatccgcccacctcggtctcccaaagtgctacgattacagccgtgagccaccatacccggtcctggagcacagtattcgatatgaaacacattacccagttaacatgtaaggccagagcagtatagagtgtaaataataattcacatttcatgggctctatgtggtatctatatgcatcatctcagtggattcttgcacatctttttgaggtaggtactattattaaacctattttgggtttatacaaattaatgacttaaccaaattcacacagccagtaaatagtagagtccacatttgaacccatagccatttgcacccagtgaactttttttttttttttctttttgaggcaaggtcttgctctgttgcctaggctggagtgcagtggcacgatcacggctcactgcagtctctacctcctaggctcaagagatcttccctaccagcctggccaacatggcgaaaccccatctctattaaaaatacaaaaataagccgggcgtggtggcatgtgcctgtaatcccagctactcaggaggctgagacaggagaagagcttgaacctgggaggtggaagttgcagggagccgagatgacaccattgcactccagcatgggcaacagagtgagattccatgttaaaaaaaaaaaaaggccggacgcattggctcgcgcctgtaaccccagcactttggaaggccaaggcgggcggatcacgaggtcaagagatcaagaccatcctggccaacatggtgaaaccctgtctctactgaaaatacaaaaattagctgggcatggtggcgcatgcctgtagtcccagctgctccggaggctgaggcaggagaatcgcttgaactcaggaggtggaggttgcagtgagctgagatcttgccactgaagtccagcctggcaacagagcgagactccatctcaaaaaagatcttcccacctcaacctcccaagtagttgggactacaggcgcccaccactatggctggctgattttttgtatttttagtagagacggggtttcaccgtgttagccagggtggtctcgatctcctgacctcgtgatcggcccgcctcggcctcccaaagtgctgggattacaggcttgagccactgggcccggcccacgcctggctaatttttaaaaatatttttgtagagatgaggtcttgctatattgcccaggctggtcttgaactcctgggctcaagctatccacatgagccaccatgcccagcccccattaaacttttttttttgagatggagtctcactctgtcacccaggctgaagtacagtggtgcaatctcagctcactacagcctctccctcctggggtcaatggattctcctgcctcagcctcctgagtagctaggattacaggcgcacgtcaccacacccagctaatttttgtatttttagtagagacagggtctcgaactcctgacctcaagtgatccacccgccttggcctcccaaattgttgggattacaggcgtgatccaccacgcctggcccccgagttttttttttttttttgagacggagtctctctctgtcgcccaggctgragtgcagtgttgccatctcggctcactgcaagctctcctcttgagtaaactcttaatggctacactattttcctggctaaaacactgcagctggaatcagaagtctgaaagttgaggcccagccctgccacttgtagctacttggcattggccaagcgaagccatgtctccaaggctgtatttcccccaaccttctttcaaatagtgacttccaggattgtgaaggccaaattaaatgtgaaaatataatgaagtaactctaaaattaatagttactagttatcaaagtagcatcctggcctccagcatgtcttcccctgactttccccaccccttggaaccctgctgaattttttatttatttatttatcctttgagacggagtctcattstcttgcccaggctggagtgcagtggcacgatctcrgctcactgcaacctccgcctcctgggttcaagcgactctcctgcctcagcctcccaagtagctaggattacaggtgcacactgccatgcctggctaattttttgtatttataatagacacagggtttcaccatcttggccagaccggtcttgaactcctgacctcaagtgatgcctgccacagcctcccaaagtgctgggattacaggtgtgagccactgaacctggactttagcacctttttatgtgcttattggccatttgtgtatcttctttagagaaaagtttatacaagtcctttgtctgttcttaaattgtgttcttttttgttctgagagtttttcatatattctagatagaacgcacttatcagatgtatgacttgcaaacattttctcccattctgtagattgtcttttcactttctttctttttttttttttttgagacggagtcttgctccatcgcccaggctggagtgcagtggcacgatctcagctcactgcaagctctgcctcccgggttcacgccattctgctgcctcagcctcccgagtagctgggactacaggcgcccgccaccacrtccggctaatttttttgtatttttagtagagatggggtttcaccatgttagccaggatggtctcgatctcctgacctcatgatccgccygcctcggcctcccaaagtgctgggattacaggcgtgagccaccgcacctgacctttactgtaccttttctgtgttgaggtatgtttagatacatcagctgaaccattatgttagaattgcctacagctggctgagcatggtggctcacgtctataatcccaggacttttggaggctgaggcagaaggatcacatgagccctggagtttgagactggcctgggcatcatagtgagacccccatctctacaaaaagttaaaaaaaaattagtagccagatgtggtggcatgcacctgtggtcctagctacttgggaggctgaggtgggaggatcatttaagcccaggttgatgctgcagtgagctgtgatggcaccactgcactccagcctaggcaacagagcgagactctgcctctcaaaaaaaaaaaaaaattgcctacagcattcagtacagtaacatgctgtacaggtttgtagcctaggagcaataggctgtatgatatagtctgggtgtgttgtaggctatagtgtctaggtttgtgtaagtacactctgtgatgttcacacaatgaaatcacccaatgacgtatttctcagaatgtatccccatcgttaagtgatgcatgattgtattttgtttgtttcatcttccaggtgaacaactttgtgatctttgaaggcttctttgcccatcaacatcgtaagtttttgcattttgttggtcacgtagtcggggtgagggaaaggaaagagctggactcttggtcctgccgrcccctcactgaggggccccgccgcttccttcctcacagggccccctgctccctctctgagggcaactcgacactctcgtgctgctgcagtcgatcccacgcccgctggtaaagcctgtattgaaggggtggaactgtagtgcagtgatggctacttactctagatgccacggggtacagtgccatctgtgggcaattttggaaaattctaaagcaacccaagtctccagcagtcatgactgtttgcctttgccctcatgggagctcagtgcattttatatttggcaagacttttaactaagcaagctcattgggagcctgtttgacagctgatatcaatggaccctcttgccagttcaggtccgtcaacataggccagagtcaggctcctttgtaaaccccaggcttctgttagccagtgagggacaggctggtgcaaacagcccttccatttgcagtcacagaatagtgacacaaatggcccaaaatttaaatgttacttttagaagataacactcagagtttataacatttccaaccagataatgaaattgatatggagaaaccaaacctcagaggcactaaaatgctgtccagattccccatcccatatacacacacacacacacacacacacacacaaacacacttactgacagtctgagccccactccttcctcttcctcaccacctccaccttaccaacttctgacagctgtacagtgcttgcttgcacagaagagcccccttcctgagctggctctgtggccaggaaaggatgtaaccaccatccaaacagcagtctgtaaccagctatgagcatcacagtgtcaggcactgagaggcacctcaactcgctttggtttccaaggcttctcccatttagcttgttcagaaccacaggctgtgagagggactgagggccaacaaggatggtgaggtctcaggcctgcaggggagggtgctgtggataaagcttaagtgaatttgctgagaagtctttcatttgccacacatacatgatggagaatctcttgagagggaaagccgggagcaagtagagaagtgaggagggggaggctgaactttggacattacatcagcctcctgcttactctgatagctccctttcagatgcccatatttattttcttttttttttttaacctaataaaacttcagtctcttcccattttcgtataggaaggagagattgtgccctccttccaaacctcccctgacctctccagagcaattcctgattaaccaagggctttgtccatctcatccagaggaacccagggtcctcgttggcccggctgggaccattccactgccccagaataccagggggccrtgacagcacccactgacagtaagagctcactycccttggctgcccttctcctgcatctcccaggcccccagagtctccccttcgatctttctccctagctctgtgtttggcctactccttctggctttcctcaacagtgttccacattcccctcaaattcccttttggtgtgctggcattgccatggtgctgctcctgcaagttctcaggaggaactgtggtgtcagggagcagargtttggggttggggtatagtggctgggaggaggggtgcaaagtatgtctcctaacgcttaccctgcctatgtcccctccactgccagctccagcaaggaagctgccacccaagagagcagagggagacatcaagccatactcctctagtgaccgagaatgtaagaggggcaagggtsgggtgtctgggcctggggtaccttaacacaagggaagagaatgctcaggggacccagggaaaggattcgttctctctaaagactcagatttcttgggctgggcatggtggctcatgcctgtaatcccagcactttgagaggctaaggcaggcagatcgcctgagtccaggggttcaagaccagcctggccaacatggtgaaaccccgtctctactaaaaatacaaaaattagctgggcacggtggcacgtgcctgtaatcccagctacttgggaggctgaggcaggagaatggcttgaacccaggaggcggaagttgcagtgagccaagatcgtgccactgcactccagcttgggtgacagagtgagactccgtctcaaaaaagaaaaaaaaaaaaaagaaagactcagatttctctttttttctaccaaaacctttgctgtcatgactctcttccktttttcttctttttctgtcttgctcttcattctccctgtccccagttctgaaggtagctgtggagcctccttggcccctaaacagggcccctcgccgcgccacacctccagcccacccacccccccgctccagcagcctgggaaactcaccagaacgaggtcccctccgcccctttgtgccagagcaggagctgctgcgttccttgcgcctctgccccccacaccctaccgcccgccttctgttggctgctgaccctgggggcagcccagctcaacgtcgtcgcaccaggtaataggagttgaagggctaaggagcctcacagctataaaagaggatgttagaaatggcaaagggcaatttgaatccatcagagagatggatcaataagatgggtggcttggggggggtcctgaaacctttcaagaaaaatatttgtgcaagtgatctgggaaaaaaatgcagtgaaggagcagaataggaccttatatggagcctagggaccctggctttaatgtgagagttatgtggaatggtaggaagaacaccgagatccatcgagttgggggaacagagccttctaagattgggaaaatcttcgcttaatacttgctggggaaggggcagtgtctgacagagagtgggaagccactggcttgtgtgccaagagtccatcgcagcaggcagggagtgggcatttcctttatttctctccctttctcttcacctctgacttctctgtttttctctccccygccccccgccatttcccatctcccttcctcccatccataacatccttccacagctcccttccccgctctgaggagagtcgatactaacagctaccctmtccctgccctgggagacctggggtgggcagggaacccctccctgagaacctcagacccactcttccattgcatcctgtaggacccagtggaacctgacagagcccataggattccctcttctactttcttagacagcagggatgtcagggtctcaaactgcctaacactttgtagcttttcttaacacaaaagcaccccttctctcctaacttgggctctgaatactttcccaacaggaagtctgatctgttgccagacttcttrgttagatggctcatacatttatctagagaagcacactcttgcttgctgtcaaactttagamcaccatggaaggtctaagggcatcctgtgccagggaaactttttaaggaattttatctatgggataaaccccatattccctctagtgtctactggtggctctaatactgctttgtgctgcctgccacacttgccctttgagcctgcgaatggccgctagtgagcaagctctgcttcagagcagtctagttaggtagaacagggacttaccagcttcccaaagggatctactcaccattgccaaactcttcatttccacattttgtgtaggtgtcagggaaccccaaactggygttgctttggggtctctaaaggagattggctgacaccaccatttcccccagatccagattctctgagggaggttgtttcttgagagtagatccagagtgtcaaggatctgttagatcctggaatcccttcttgcatccatccctccctggtagctaggtcccgatatactcctgtcttgtgagattgtcgagatgagatgggggaccactcttcctctgtccttcctctctcctttcctccatagcaaggacgaccttccctgctccatgcccagagtatagctagatcccttcccctccctaccctctgaatgtgtgctagatcaggtgccccactgtgtttcctgaaatccttgggagccggatctccccatctcccctactcactcttcccttttcttctctcagtgttgtctgaataaagtgtgaaatcttttgtgttttctaaattgacattttcaatgaaaaaaagaatcacaaaaaaaaaagttgtcagcctcatttgtgcgtcatcccttattttcctgggatctcaggacctctgtccctctcatttctcacttctgagatctgcacatcttttacccaggagcctcagagctcctgagtctggtgtctgcctatccccatcttcactgttagtcctcctgcagattctgtgtctcctttcatgtaggtgctggatccctgtgtgtgggcttccgtatctactccctcattccctccaggaacctccagctctccccagtgacttctaccctttactctgggcgtgcctttgccaagatgtcaaagcttaccaacatctctggatccactaattacctcctgcctcctgtattcgtcttcccactctgattacctgacgtctgctccactaaaccgctggatctctctcaagacaaacccttacctccattgagagtgcaacacagtctgtcaccctatttacagaggcccccttccttttcctcctaaattcaaaattcagccttgtcacttcctatttccctctggtctaaggaatctttttttttttttttgagatggagtcttgctctgtcgccaggctggagtgcagtggcacaatctcagctcactgcaacctccgcctcctgggttcaagcgattctcctgccttagcctcccaagtagctgggattacagaagtgcaccaccgtgcccagctagtttgtgtatttttagtagagacggggtttcaccatgttggccaggttggtctcgatctcctgatcacgtgatctgcccgtcttggcctcccaaagtgctgggattacaagcctgagccaccgcgcccagcctggtctaaggaatcttatagttaaggtaaccctgttttccaaaccaaacaccagagtacccgatccaacacatttttgaccacatgtgagtctgttcttctgacatgatttggatcacacctagccatagatttaacacattacctcaactagaaagaatagagcaataaatcagaagcactccagaaaatcttgggtataaaatgaacttcccccgcccttttctggggcacagctttgattaaaacctgttaggaatgataattacccccttctctttgttcctgtgctattccttttactcctctcctctgattcctccatacccacccatctttcatccagtagcctcctccccatcatctcccatttcttctacagggggactcccccaggtctggtagcccaaagctgctgctacagccgccatgggggggtgaattcctcatcccccaatacaggtaagtattcactcctccctaccctcaaatcaagtaggccacattcactgtctactcctgccttcccattcacatgcctgatatttccacaggcaaccaagactccaagcagggagaacaggaaacaaagaataggtgaggtctaaacccctcccctaacagcctcccaccaccatctgactcccttcctaacatcattctcagtcacttcctactcttaaatcttattgtatgaactggacaccagctcctcccacaattccttctaccttacatcctgcaagcccctttcccccacaggttcaactctggtacttccctttggaatacggattctctgagaggttttaaatttggacatagcactaatggttccagcttcatacccatcatgtgtcctacattaaaacctggcccgagaccttgaagagtctgtaatcttaatttcctctttagtattcctataacccactctccatctccccacctaccaggtctgccagtgaggagcaggccttgtcacaggatgggtctggggagaagcccatgcacacagctcctccacaggccccggccccgccagcccagtcctggacagtgggtggggacatactcaacgccaggttcattcgaaacctgcaggaacgtcgcagcaccaggccttggtgaccgcagccccgtcaaacatcttcaaagtattatttctccctcactacaggaaagagccaaagcccaaccctcataatagatggatacattcattcattcattcattcagcaggcttatcagattcaagtcatttgtatcttttaaccagaccaataaaagtatttatttttatcacaagagctgttgaaaaatttgactcattatttcagccgcctcacccctcactgtcgttgcacccattcagccttcagccctgtttttgctcagctttttgctcaaaggcctcagctgtgaatacagcgcttgggggggcgggggaggctgtaacttgcgcaagcgcactcaggcagtctccgagcccgcgggcgcaggcgcgcttacagccgacagagcgcttcagccgcttccctcgagcctgcagtgcgcaagcgcgggacatctccgtttccctccctcagccccttccccccctacccccccgccccggcctcctttccccttcacgaagccggctctggggcgcgctcacccctgtgaggaggccggaggtcggactcaggaggctccttctccactcccggaagatcatgtaccagcccagccggggtgcggcccggcgtctcggcccttgcctgcgcgcctaccaggctcgaccccaggtgagcggaggagaagagggagggaggagagggggcggggagagaccctcctcaaagccggtgcgtggggcggagcgcgcgctgggttccgcgcaggcgcagagacacccgccgccccttcccacctgtgccctgcagcgcgtggacaggctaggggtcgcgggagcgggagggaggcgctgccgggcctgtcgcgcaaggacgtcggtcctcccaggtttgagggcggtcaggcggggtcaaggccaggcagcggggcgcgtctgcgttgcgcccgactctccgcggttacctgtgcctagaggtgatttgaagggcaggggccgagagattcgtagccctgctgcggcgccgtcccggagttccccggcccagaccagacccgcggggcgccctcagcagcccgcccgtcttgcactcggagagcggtcctggcaggaaggccggccagtgtgcacccggttcgggcccctgcgcccgggctggcaagatggccacgcccccagcagagacggcgcctctaggacaccatcggggaccgaggtacccgagcggtccgcccgccttccctgcagtgagacgatcccctggggggttccttgggagcggagggactcgggtgaggcctaactttgggtgacctccccttgcagtttcaacgtcggtaaacccaggagagtgaaggccagcctttaactgtctcctgaggttgtgtctgtcattagaggggcccgaaatgataatagcttccatttatgtactgctttctaggtcgctacgttttgtttacattcattatttcatataggcctcataacccagtgaggctttattgttctcatttataggacatttgtaggaagcggaggcatagggaatgagaatgcctaaagttacatgatagaattcagattcctagcttcagctggatattcttttttctctgtacatttgcctcgcacacttaatcatggagatgtacaggccacagcatttaatccacagtacaataaaacctgttattcgttaactcatcaagtatgtattacatgattcttgcgataagagaggtgaaactgcccccagtgttggaatctttttttttttttttttgaaatggagtcttgctccgtcacccaggctgaagtgcattggcaccatctcggctcactgcaatctccgtctcctgggttcaagcaattctccttcctcagcctcccgagtagctgggactacaggctcccgccaccacacccggctaattgttttgtatctttagtagagatggggtgtcaccatattggccaggctggtctcgaactcctagacctcgtgatccgcccgcctcggcttcccaaagtgctgggattacaggcgtgagccaccgcgcccggccacatttctttaagattccaacactgggccgggcacggtggctcacgcctgtaatcccagcactttgggaggccgaggtgggcggattacctgaggtcaggagttcgagaacagcctggccaacatggtgaaaccccatctgtaactaaaaatacaaaaattagccgggcgtggtgaagggtgcctgtaatcccagctactcgggaggctgaggcaggagaatggcttgaacccaggaggcggcggttgcagtgacccgagttcgcgccaatgcactccagcctgggcgacggtgagacttcgtctcaaaaaaagaaaaaaaagtaaaatgtctgctaggttttgggaggtgccggtatttatgtcacataaaacagtttgctcggctgggcgcggtggcccacgcctgtaatcccagcactttaggaggcagaggcgggtggatcacgaggtcaagagatgaaaaccatcctggctaacatggtgaaatcctgtctctactaaaaatacaaaaactagctgggcatggtggcgcgcgcctgtagtcccagctactcaggaggctgaggcaggaaaatcacttgaacccgggaggcggaggttgcagtgagctgagatcgtgctactgcactccagcctggcaacagagcgagactccatctcaaaataaataataaaataaaatggtttcctcctgttttcagtagagatggagatgaatccatcccttttttcctatagtaattccatccattctgtcaggaggaataggtattggaagcctgttgagcatccaggggatcaaggggtgttagacaagtggattcttatctttctcccttctgttctttctccttaggaccagctttatccagggactctaccattcccacccctttggccccactccacgacaaccacttccccatcttctcctctattctggtctcccctgcccccacgccttcccacccagcgtcttccccaggttcccccactacctctccctcagatccaggccctcagctcagcatgggtggttctccctccaggaaagggggaggagggaccaggacctgagttgcatagcggctgcctggatgggcttagaagcctttttgagggacctccctgcccctatcctggggcttggatacctttccaagtccctggaactgcccacccttcccctgccaccccgtcaggagatcctagtatggaggaacatctgtctgtcatgtatgagagactgagacaagaggtaagtcagtgcaaaagtggccttcgtctacagtgggaaggatgtgggtaatccttggacgtacagggatagtcaactggattcttttttggaaccatgaggcaggcatagaaatatattataaacattttcctgagaaaatgatgttccagccaggcacggtggctcaaagtgctgtaatcccagcactttgggaggcttaggcaggtggatcacctgaggtcaggagttcaagaccagcctggccaacatggtgaaaccccatctctactaaaaacacaaaaatcagccaggcatggtggcagacgcctataatcccagctactcaggaggctgaggcaggagaatcgcttgaacccaggaggcgcagtgaaaggagatatctccattgtactccagcctaggcaacagagcgagactccgtctcaaaaaaaaaaaaaagaaagaaaatgatgttcctcattttgggttaagggaggttaatcatgggatgagatctttcactccaagatgggagtaaggaggccttaaaaatagaaaactgggcctggcacatggctcacgcttataatcctagcactttgggaggccgaggcaggcggatcacaaggtcaggagttcaagaccagcctggccaacacagtgaaaccccgtctctactaaaaatacaaaaattagctgggcatggtggtgggtgcctgtaatcccagcta

SEQ ID NO: 97094 - DNA, 15031 bp, Homo sapiens
gcttccacagcctgacgccgaccttcgcaggtgggccctggggctgggcatggggcactgggctgcccacttcgccgggagcagctttccaaatgcagacgcccttgggtggagtggaggggacttgaggtgggatttcccccagggtgctcggaggcaaggatggcattcccctgtctccctggcctcctaccagcctaaagtggcaggccagctggtggtgccctcagggcgaaggacatcccaatggccatggcctcgtgtcagccccagttcagtcccagatgcttcccaagggtttgtcgtgcgaggctcagacagacctggttcctgcctcatagggtctccccagtgaggccgcaagccttttgcctggccacagctggagacacttccagcggccaagtgccatgccagggctgtcctctgggcagttccagagacccagggctttctgggagaggctggctcctcaccaggtagcagccaggcagtaagagccacagctgcctgttgagcacgcgccgtatgccaggtgctttatagatgcctctcatacaagcctcacgcaccaaccacgaggcaggggccattagccccgttttacaggtgaggaaacgtaaggctcggtgaagtcgtcagaatgaaccaggcttggaacttgggcatggaatactgtcagcccctggctcttgccaccaggccttgtccctccttgccaacaccccacccacgggcctctgcttggtgactctctcctcaccccgcacctctgaccctgcgtcgggtgcatcctgaatgcttcacaagcaggagggaagcacgtttctctgtaggaccccctgacccctcaaatacctaagagtcagggtcccccaccccacttgcccccactgtggggcgtcctttagagtctccaggttggatgctctcagcccggttctcctttcctgggggaccataactctaagaggggcctcaatgaaggcaggtgtcaaagccatagagatagccccagaggccggttttcaagcatggactgggaagagaaggtcatggaagagatgccaggcgaggggtgagcatggcaaggcgaggggcttccctgaggcagggggacgcccagaggagccggcaaggagaggagagggctggccggagagtcctggtctgtgccagagagtcaccctctgctgttccctcaccccagccgtcctagtgcacattgacaaccttcgctgggagggcgtgcctttcatcctgatgtctggcaaagccttggacgagagagtgggctacgctcggatcttgttcaagaaccaggcctgctgtgtgcagagcgaaaagcactgggccgcggcgcagagccagtgcctgccccggcagctcgtcttccacatcggccatggcgacctgggcagccctgccgtgctggtcagcaggaacctgttcaggccctccctgccctccagctggaaggaaatggagggaccacctgggctccgccttttcggcagccctctgtccgattactacgcctacagccctgtgcgggagcgggacgcccactccgtcctcttatcccatatcttccatggccggaagaatttcttcatcaccacagagaacttgctggcctcctggaacttctggacccctctgctggagagcctggcccataaggccccacgcctctaccctggaggagctgagaatggccgtctgttggactttgagttcagtagcggccggttgttcttttcccagcagcagccggagcagctggtgccagggccagggccggccccaatgcccagtgacttccaggtcctcagggccaagtaccgagagagcccgctggtctccgcctggtccgaggagctgatctctaagctggctaatgacatcgaggccaccgctgtgcgagccgtgcggcgctttggccagttccacctggcactgtcggggggctcgagccccgtggccctgttccagcagctggccacggcgcactatggcttcccctgggcccacacgcacctgtggctggttgacgagcgctgcgtcccactctcagacccggagtccaacttccagggcctgcaggcccacctgctgcagcacgtccggatcccctactacaacatccaccccatgcctgtgcacctgcagcagcggctctgcgccgaggaggaccagggcgcccagatctatgccagggagatctcagccctggtggccaacagcagcttcgacctggtgctgctgggcatgggtgccgacgggcacacagcctccctcttcccacagtcacccactggcctggatggcgagcagctggtcgtgctgaccacgagcccctcccagccacaccgccgcatgagccttagcctgcctctcatcaaccgcgccaagaaggtggcagtcctggtcatgggcaggatgaagcgtgagatcaccacgctggtgagccgggtgggccatgagcccaagaagtggcccatctcgggtgtcctgccgcactccggccagctggtgtggtacatggactacgacgccttcctgggatgagggcgcctgtgccccttgcccgcttcgctcctgtgctttccttcgcccgtgtcttccctcccttctcggccccgccacctgcccagcgtgccctggctctccagaaccttctatcccacagtcaggccccagagagggcaggacaagccttgtcccgatgcctttgaccggcagctctgtgtattggtggatagatgcagaaacaaggaagaaatggagtctgctcctgagaagcttcaaattcaggccaggagagaagtcttaagaaaagacctccagcagttacacattcatatcaaccagcacaacacgggatggcgcccaaactccggcgttcacaagaggagacgtgacgtggtgggctgaggttaatcagggaaggtttcctgggggaggtgatccttgaactggctcccggggaacattcagagcatgattggtagacagaagggtgcagaggcgcccaggggagtacattgccccgtgcaaagcaggggcattggggactgtcttgagaccctgagggggtcaagcccctccttccccagctgcccctccttctagaacctctgcacatctagcctctggccctcctcttcactgcctccacctgctcccgcttgccatccctgtctcctccatcctggctgtgcagtaggaattccaggctcctccctgtgtctttgctgttcttcagactccatttatagagaatgagggctgataacaggaatacagtggcaaagactagactgtggaaagggttccagaaatcttttttcttttttaattaaaaaaaatatttgcagagatgagctcttgctatgttgcccaggctggtctcaaactcctgggctcaagcgatcctcccatctcagcctcccagagtgctgggattacaggtgtgagctactgcgcccagccccagaaatctcagtgctgtttggagctccatttctcatttgatgacttgctctgcgtggggaggtggggtctcattcccccaacttcctcagggaggacccctgccctccgctgctcctctgtcctgctagccttcctccaggaagcacactgggtgcagataatcaggacattccagagatccccaatttaagagggtcatttccatctcaggggactcccggatgggtgtttccgctctcaatagcccctcttgttttaccaggaaagatccagttaaatcacccactgaggtgacagctcattagcggggagagagatggagcatcgagtgacactgggccatccaggcggctctgctcccaccagacaggagctaggcctcactggcaggggggctgcccacagccttttcaggggctcgcttggcgggtgacggggccgcagccaggccttctctccctgccccttggtgaccccgtggcttcctgtctgctggcctctcctgctacttatcacttcaccacgaactctctgcctgagactggggaagtaagcgggtatcttctcagtgagcataggttggggactgtgatcttgagaagccatgggccagcaatacctgcttttctgaagcccccaaggagggctctgacattctttttaaaaacaccacaaagcaaaattcccaggacatgtgtagttttgtttgttcagtatcccacaacttaaggctgggagatggaactcttggttaaggtcgatttttctgtctggcttctccgcaccttccacttgctctctggatcaggcagatataaactttctagcgcattttgagagagggctttcttgggtgagggagcatggcaaagtcggtttctctctggactgtttacacttcaaggcggtggatttagaggaatcctggctttcattttcaatgccagtctgagacatgttcccaagccggggctcttgttcacaccacttactctggccaccaacaacaacccaggccagacagagcatctctttttttttttttgagacagagtctctgtcgcccaggctggagcccagtggcgagatcttggctcactacaacctccacctcccgggttcaggcaattctcgtgcctaagcctcccgagtagctgcgactacaggcgccggccagcatgcctgtctaatttttgtattttagtagagacagggtttcaccatgttgcccaggctggtctcgaactcctgagctcaggcagtctacccacctcagcctcccaaagtgctgggattacaggcgtgagccaccgcgcccagccagaacatctgtttttacacccagagagcgcccctcgttaggacagaaccacggtgcccagagccaggaagccgccctcctggcgcccagcatctgagcttctacacgtgatgggcgggctcaggagaggacagggagtcgtggtggaagttccacagctggccgcgtgggggggcccttgcaccgcactgccgcctcctgactgcccctatccccgcagcccctgtgccggatttcatttccctcctctctcccagggtacctggccccagcactctcccatctgttcttcaggaaccgactcctctccagttgcaacaccagggagaaaggggcctccacatgcccaagtacccctgcaggatgaagggcaggccggcccttgatgtgccatttctgaataatagtcactgccgccgagtctaggatgtcctgttctaactcagccctgcctcggatgcaccaccgatctgtgcagagtgggtgtgggagtgtgggtgagggtcgaaatgccaaaggtctactttccagaatcaagtgccttctgcaaatcatgttggaaaagtccaaacctggagatgtccctgtgcctccgcccctacccaccccttttccttcagctgtgttaggaaggagaagttttcagaaccctctaggctggtggctttcaaacttcagaccatgatctgcagcaagaaacgtgccttccatcataaatcagtccatttgtttacaactgtgttccaagcaggtttcataaagaaattcttaaccttagaacctcggatatcctctatgttttagttttcatttttttaaaatgcttcttaaaattcactaaattgggctaggtgtggctcatgcctgtaatcccagcactatgggaggctgaggtgagaggatcacttgagcccagaaggttgaaaccagcctgggcaacatagtgagaccccatctctacaaaaagttttaaaaccaggtatggtggtgccctcctgtggtcccagctactcgggagtctgaggtgggaggatcacctgagcccaggagactgaggctgcagtaaggtgtgattgcactattgctctctagcctggaaaacagagtgagaccctatctcaaaaaaaaaaaaaaaaaaaaaggaaagagtgatgacaacagcccagggagcagccccgctcagaacccaagtcccaagttccagcactgtgttcccaggcaggctgtttgcctcttcctggtctggaagcccttgggtcctatggtggcggcagctcccacagtccaggttccctggtggggaccaatgattccatcygcatggaagcccacgtgtgcacttaggggcccataaatggcagaagggcccctcctttgggagaccttgtcagtcagcatctctagggcaaccgtgattgccatttgtagaggggaaggaatcaagggactttaagctagatcaaaatctggggacaaattctcctgctaactgcaagttaaaataggcccttcttactgaatttccctgtttgtttctctgcagacaatgctttagccctactcttgggcccccaagttagcagagtaatcaaagcttcctaccgtttggcctactattccagactagtccytcgaggggttcccttccaaaatatgcagggctcaggctcccaattccgggcctgtctgctttgcttgtgtttctcctgtccctgttctcccggagggcccaggtggaactcacgacagggagggagackcttcccaaaaacctgcagggctatttcccagaatttggttttcaagtacaaaactttttgtcctgtaagatatatgcagcctcacagaagcagcctctgcctccactttaccagctacgtttttatcttaagcacatggggctcccttagaacttactccactgatttaaaaaaaaaaaactgcctggcagcatctcagtgtcagagtgagcacggcacaggaaaggcccgtggtgacgagggtgaggtggccacagtgaccggacracaaatgagactctgcaaatgagactccagagggtgaagatctgcggtctccagacatcataggccatgtgacccactaggggcyrcttacccctggccgtccgctggctgaactgaacgcattccctctctccgcaactctcccgtgaggctgcacccrtgtgggtagcactggaagcggcactgtttgcattgtacataggaaggaaggaagttcttccagcctcaccagcacctggcagcgagtcagagcctgtgagggcatccgaagcagtgatgcagtgtcaacctcccagctggtgccactctgccctcgggggctccaagcattgtaactcagtcatgggagctgcctctttggaagtgcagatttattcctgtaataatcctgcctgcttttacctctygtccactgaccagcaagtgtgagtcccrgtgtcagtcggcacagtccagtgtccatctgcatttgctcatgcagagggggtgagttgggcactccctgttgttggttttccttttgcagcacactgggcagtctccctataaaacaaaaaccccaccttctgtgccttctgctttagagcagagcyccccctcccatttcctcagtcttccctgcaaaatctgtccaccggggaaggcagcaggaaccctgggcagcgggtgttctgggaaggctagtgacagcagatgtcatccaggaacagccacacacggttctccaggccgccgtcagcagctcaaggtggggtatgagtgagaagctgaggatctcgcagcttgttgctgagcaaggtgcaaccgggctcatgctgtcatcagcacaagacgggatggcaagggctttcagacgcatttccaagagtccagcaagccagggggaagatgatccctttgccgaagtgtaccctctagccaacttttgggagcgcttctgtttgcaaagcgctggggatgtgcctgtctctgtgtgacccacgaacgggaagggagagcactggagtaatgacacttctgctgctgctttgattctcaaggctgatctttaaaaccctcgccttgctgacaggtgctttaaaggcagtctgcatcttttcttcccttggtgtgggagaggtaaacactttgatttgctgaaagctgtatggagtatatttgaacagctagtagttagctttgaaagtggaagtgtgaacagacactacttgtgtcgctttgggtccttcactttacccccacagaagtctagaggcgtctgttataaagcgttacggggcgcctgcatgcaggaggaaggacctgtattagctggaaatcatcaggaacccagcttgcctccatctctctgagatgtgctgggtacagcctgcccctcctagttctgtccaccgggaagagccggctggcggcagatccccaggggcagagcccctgctggatcctgggagctcatctttacctgtgccggagtgggaactgtgattccagccgggcaggtcagagtggagcagtgctaagaggctgttgcaggagaactagacgggcggggcctgctgcatctggatcatgtttctgtgctctgccccgcgctagggactcagggtctgggcttctgccaggtgaggagcagagagactgttcccttgggtggagaggtgtgggcatgagagccacccattgccaagcagcaagaatgttcgtgcttttttccagagaggggaaccccactggtttttgtggaaacaatggaaacttacagatgcctgcctgggatgatgaggcacattcagaacaaatgcttttttttttttgagacagagtctcgctctgacgcccaggctggagtgcagtggcgcgatctcggctcactgcaaactttgcctcccaggttcargtgattctcctacctcagcctcccgagtagctgggattacaccaccatgcccagcaaatttttgtgtttttrgtagagacggagtttcaccatgttggccaggctggtctcgaactcctgacctcaggtgatccatccgcctyggcctcccaragtgctgggattacaggcgggagccaccatgcctggccagaacaaatgcctttttaaaccttttargaacatttttaaaatgtctttttctatgtcaaatgtaacgtttatttttttaaacaataaaattgatttgccaaaatccgggctttaattctttatttggggcatgaggtgtaggggtttgtgggccccagcgtcatgctgtgtgtgttcttggaggaggggagggctgccgtgagtgagggccctgaaccgaggacagccgcgtgcctgttgcgagtgtaagtgtgtctgactgagcaagccagtgcattccgtttgcaagagggtctgtgggcctcatgggagagagagcagtgggcaggatgatctcatttcatagactcccaagcagtctaggaagagtcccccaaccttcccggcagcccactggaggggaaggagctcacccctgagtgggagatcgggaggggagggtctttgaggacaccagagcctgatgccttcatttgtcttctctcctgtcccttgcctgagtcctacctccaagctgtgtcacactcccaggaatgtaagtgttttggggaagtcaaataggatttcaggaccacttgaggtacagaagttagagatttgcaggttgtcaccaacagcatgcaggacccacacaggcttggtgacatcacaaggtggcaaaaggagcagcgcacacattcgaaataggtgagctctgggcagggaccccatggcagaggggacagagacgggtgagacatgcccagagcctgcaagggaagatgtcacgaaggccagaaaccagagctgcagtgaccgtccctgcctgtccctcagatgggaggcgcgcgggggatctgctgcttcccggggggtagcccagggcgtcccctccctgcttctctgtggtgatggctgctggttccacagtcctcacagaaacatggcggggcaggactgtgggacccagccagcgtctgtgagggctgcactggagggtcacctggtgtccagcccccgtttggggaccctcccatacatgtgttctggggagttccgatggcaggcatggggcgtgtgacccagtgctagccgatcaggacatccaatgcccacagccgcagcaatgggatctgggagggctcagggcccaaactggtcaaatcagagtgaccccgaggactcaggctgaagcggcaccatttctctggactcaggccttggtgagctgcagcagccatctcagcgccacggaggcctaaggacaaggctggcatggaggagaggagagccccaggatcccacttcgggggctgtctctgggacctgattccagtctcctgaagtcagcctgcgggcctcgtttctgggtgcctaaactaccttgtagcagcagaacttaatagatactggagctagtagctttgttatgtatttccggaagcccagcagaaaccccacactgacctaagtaagaaggtgattctcatgaaccaagaggacagatccttctgtttggggtcagggtttcagcagtccagtgtggcaacaccagttgggtggcccctgctgtgcagcatcagtttcttcttgcttaattggaactgttttcctgatagaccatagttttggagatgcagggacagatggaagggcaggaggggaagagttgcgcaaatcataaaagaagccgtggtgaagacaagctcaggagctgccagcctgagtccaccttctccagggtctcttacaagctctttacagacagccagagcccgggtggggtcagccagctgcccctcgccacccagctcccagcagaaggggaggggatgcggctccacccatgccctctcttacccccatcttcccactcacctgtcgggctgaggaccacgaaggcagagactccatacattctgctccttttcgtgtttctggcactttacacgccgccctgcagtgaatgtgtgagtgaatgaatgagtgaatggcaataaggaaagagagtggtcagcaaggcggctggaggggtggaggcctgagcgggtgtggggccagcggtgagcctggcacgtgtcatcctctctaggggagggagggtctaagcacatgggtctcctgtgcccagagtgggccagggcctaggggtgcaatggatgtggtccagccatggcaggccaccacgcttgttggcaccgtgggatagggccacgcagaagcagggcaaggtctgacccccgctcctgacagctcccactggctgctgatggagagcaaagccacggtcagcgcccactgctggacgctgcagcagggatggcagccaggggggcccccaacagcttagggctgctctgtccccctggagaggtctcactacagccctttcctttcccccgtccccactcactggctgcggaaacccagcctcatgagttctgtttgtctgaagaagcatcgttgggaggaaaaattatcaaactaagctcatgctatcagtcaggccctcctcctactccgtatgtctttatttttttactgaaaaaaataaaatacagtaagcactcggatgagaatattaatccatggagattgcccccttcagcattcactgtatgaggcctttttatatttgcttttttaaaagaaaaaaatatatatattttttgatggcaaaaacctggacacacatatttttgtaaaaatcacacatgcttgttacaaatgcattgaaacagtgcagaaaagtacacaaatgtgtgtaaagaaaatcactgtcgtccagccctccagaaacgaacaacagtaacaacgggtgcacatccttcaagacacggatgcaaatagaagattcaaaatatttcgtaaaaatgggatcctcctcttgatgctaattttaatcttaatacttaataaataatagtgcattaataattttactagaaactgaaggaatttcattccattcagaaatatattttgtcacacaatcaatatcatttcccaaaaggtctctttaacattagaagtgtatgaaaagccaggtgcggtggctcccgcctgtaatcccagcactttgggagaccgaggcgggcagattatctgaggtcaggagttcgagattagcctgaccaacatggcgaaacctcgtctctactaaaaatacaaaaattagctgggcgtggtggcaggtgcctgtaatcccagctgctggggaggctgaggcaggagaatcgcttgaacccaggaggtgggggttgcaatgagctctaatcacgccactgcactccaacctggggggacagagcgagactctgtctcaaaaaaaaaagtagtttatggaaaaacattaagtctgaagtccttaatgaattttaatgtgatttttaactccctgaatcagttttgattgggggtgtctactgactttgacaaatacggacattgattctccatcacttcccatttcctggcttccaactctggatttttttttttttttttttttttttttgagattactcactctgtcacctaggctggagagcagtggtgcgatctcggttcactgcagcctctgcctcctgggttcaagtgattctcctgcctcagcctcccaagtagctgggactacagatgtgcaccaccatacttggctaagttttgttttgtatttttagtagagatggggtttagccatattggccaggctggtctcgcactcctgacctcaagtgatccacccatcttggcctcccaaagtgctggaattaacaggtgtgagccactgctcccggccccaactctggatttttgtaggcacattattttttcttgctattctccaggatccttcattgttccttccttgttggctctgtccgacttgcctcctgtgggctcccacctggctgcctcccacttctaatgcccaaactccaggcaccgtctgctgtccgggaggatggaggtatgaccacgtctcatttgtcttcctgcttgtggagcacccttcttctctgtgtccttctcttactggggccagggctgccccatattctggccgtgtccatctgtccctcacgcatgtggacaggcaggctgaccacacagccttgcaccgcccagcacgcggggctcaggtcctaacaactgctgactgctggctcagggctgggcactgttccaggggataccaaggaaccaagaccccgtcttcctgggccgtatgctttttgttctcttgagtcttgcattgctcccttatttggggttcacccatccatcttcaaaagagtcttccttaccctctgctgcccctgccagctctcaccattttaacccaaagactttaaagacgataaaggcactatctcgaaggccaccactgccctcctgcaggacaaatgcacagcttggaggttgccaccgcaagagggtaagaggccaccacccccacaacagctgactcatagctcgggtaagaggccaccacccccacaacagctgactcacagctcgggtaagaggctcccagtttgcagatgcgaaaccaaggcttgaagtcacctatcttgcccgagatgacagctggcaagtggcaacgctgctagagtctgcccgagcccttagtgcactcccgtaaccagcaggtcacactaggagcagctactccagggagaggaagagctgacactgggcaaacccgcagctccagccaccagcagccgacccattgccagacactgtgttacatctccagtctgtatcaggcccccagggcccccaggtcaggactccaaccaagattgggatccagtttgctcagctctggcttctccctggggaagtgtcttcctactgagccacagcagagaacatcattcacttggggcaggagttgtcaccaaggcctgctggctgccaccaaatctaggagactagaacaatgtctgccaatcctgagagcaggtccagaggggtaacttttatctttattgcctgggctgctctatcgtcctcttcctttattctctttgtgaatttaattatggggggcacatagccgaggtttgtctgccttctcacttctaccccaaagggaaggcagtttgttaagggtgaattttctccccttggatttctatttatgtataaaaactaccttgggccgggtgcagtggctcacgcctgtaatcccagcactttgggaggccgaggcaggaggatcacttgaggtcaggagtttgagaccaacctgactaacatggtgaaaccccgtctctactaaaaatacaaaacattagctgggcgtggtagtgcacgcctgtaatcccagctacttgggaagctgaggtgggagaattgcttgaatcctggaggcggaggttgcagtgagccaagattgcgccactgcactccaacctgggtgacagagtgagactctgtctcaaacaaacaaaaaaattcatcacgtaacgaaaaaccatttgttggcaattgaaataaaatatatatgtatatataatattctaatgaaaaaatataaaaataaaatgacccagtaggtacaaatttctttgtaatggaagacaaatgctgatataatttaaatcacaataacagccaatggcctaaaaaagaaaggaagggagggtttagaagactctcgagatagcccaggcacaggtggaggcccagaaaagctttaggtcaggagaaaggcgtaaaccccaggtcacttgctatgtaggcagctgcagggatgcagggcacccacagtgagagagagagaaaaggctgccctgggctggaggccacaacaccagaccccgaaatcctcctttaagaggtcttgagcccctgtgtattagtctgttttcacgctgctgataaagacatacctgagattgggtattttattttgttttgttttgttttattttattgagatggaatctcgctctgtcacacaagctggagcgcagggtacgatcttggctcactgcaacctgtgcctccagggttcaagcaattctcctgtctcagcctccccagtagagtagctgggactacaggtgtgcaccaccatgcccagctaattttttttttttt

SEQ ID NO: 97095 - DNA, 58979 bp, Homo sapiens
  misc_feature (1)...(58979): n = A,T,C or G
ttcctccacacaagttaaccactattactaatttcttgtatgtccctctttaagattattcatgtacagcccactgttattagccactgtccctggctttccttcactaacagttgcatgctacagacactggtctgccccttttcttgtctagcatatcttggagaatgttccttatcagtatagaacatacctgttttaaacactgaaatatttctattatatggatattcaaatatttaatcagtcccctattggtggacatcagggtttctcaatattttgctgttataatgttgccaagagcaaccttgtacgtatatctgctgagtactggtaaaaatgtcctagagtagagctgctgtgtcaaaagatatatatgtgtaattctgagatattgctaaattgccctctacataactgcacaaatgtgtctgcccaccagccatctgtaagagtgcctcgatgcagcctcaccaatgcagtacttcaaacatttgtagatttctgacaatatactagatggactcccagtatagttttgatttgtatttctattgagtgagactgagcatgtctccattatgttcatgagccatttatttctatttctgtaaacagactttttatacccccttttcctatttttttttaacatgttaaatttatgtaaggacttttcctatttttctacagggtagtctttttcaacatctaagagctctttaaaatagtaaagccggccaggcacggtggctcacacctgtaatcccagtacttttagaggctgaggcaggtagatcacctgaggctgggagttcaagaccagcctgaccaacacggagaaaccccgtctctacaaaaataccaaattagccaggcgtggtggggcacacctgtnnnnnnnnnnnnnnnnnnnnnnnnnnnnnnnnnnnnnnnnnnnnnnnnnnnnnnnnnnnnnnnnnnnnnnnnnnnnnnnnnnnnnnnnnnnnnnnnnnnnnnnnnnnnnnnnnnnnnnnnnnnnnnnnnnnnnnnnnnnnnnnnnnnnnnnnnnnnnnnnnnnnnnnnnnnnnnnnnnnnnnnnnnnnnnnnnnnnnnnnnnnnnnnnnnnnnnnnnnnnnnnnnnnnnnnnnnnnnnnnnnnnnnnnnnnnnnnnnnnnnnnnnnnnnnnnnnnnnnnnnnnnnnnnnnnnnnnnnnnnnnnnnnnnnnnnnnnnnnnnnnnnnnnnnnnnnnnnnnnnnnnnnnnnnnnnnnnnnnnnnnnnnnnnnnnnnnnnnnnnnnnnnnnnnnnnnnnnnnnnnnnnnnnnnnnnnnnnnnnnnnnnnnnnnnnnnnnnnnnnnnnnnnnnnnnnnnnnnnnnnnnnnnnnnnnnnnnnnnnnnnnnnnnnnnnnnnnnnnnnnnnnnnnnnnnnnnnnnnnnnnnnnnnnnnnnnnnnnnnnnnnnnnnnnnnnnnnnnnnnnnnnnnnnnnnnnnnnnnnnnnnnnnnnnnnnnnnnnnnnnnnnnnnnnnnnnnnnnnnnnnnnnnnnnnnnnnnnnnnnnnnnnnnnnnnnnnnnnnnnnnnnnnnnnnnnnnnnnnnnnnnnnnnnnnnnnnnnnnnnnnnnnnnnnnnnnnnnnnnnnnnnnnnnnnnnnnnnnnnnnnnnnnnnnnnnnnnnnnnnnnnnnnnnnnnnnnnnnnnnnnnnnnnnnnnnnnnnnnnnnnnnnnnnnnnnnnnngaatgttggccttccccagtctcaattatcagtagcaaggtactcaaagcccagtttaaacaaatgtttctgcagagactttactgtactgggggtctagcccttcctattcttctaactcactgatttctgcttgtatatctttaataatttccccattctgctttccttcaggttcttttaagagatggagtcttgctctgtcactcagactagagtgcagtggctggatctcagctcactgcaaccttcacctcctgggttcaaggaattctcctacctcagcctcctgagtagttgggactacaggcgcctgccacgatgcccagctaattttcatgttttgttttgttttgttttttttacagagattggtttcaccatgttgcccaaggtggtctcgaactcctgagctcaggccatccactcatctcagcctaccaaagtgctaggattataggagtgagccactgtccctggcctccttcaggttttttttattgtcctttctaacaatcagaggcttgattcattttcattcttttcttaatggcacaaggatttggcaatgaacattcctctgagctctcctttagtctctgataagtaatgattgcattattgctattctctagatattctgcagttttaatttcaaatccctgtttgacctaaaggctgtttgcatgagttatacaattccagaaagaagtatctgttttctggttttattattaacttatagatttaactaagatcagagtatgacactgtccttttctgtttttcagtatttgaagtgttgttcattgaaaaagattagcttcttgaatgttccagacaggaagagggagggagaggaggggagaaaggaatagatagaattttagtaattttaattatggttcaattctaagcattttaaaatttcattttactttttaaaactatgatttacaagtgtgtttaatttccaaattcacatagctttttgttaatctcttcattattgccttctaaccttaattgcttcatatttaaattatatggtatgtatggtaccaactgtttttaaatcgtctgattttatggatctataattaatttttctcccatagtccatatatgcttgagaacgatctatatctaattattgggtacagaggtctatatttgtctattataccatgcctgttcactggttgttcaaatctacatatgggcattctgtttatcttactagtagtacgcagggtatgttgaaatctccaactgtgatggtggacttgtcaacttctccctgtggttttatcagtttttcctgggtattttgaggctattctgataggtacataaaatacaaaaattgctatatcctcctaattaacacttattatcaaattgttactaatgctttctgttccagaatcctattttgtttgatactaaagctgcatcatttgtttctagttaatgtatactggcatatctttatcactctcctttataaaaactttcaacctttttgtaccttcatattttaaatatatagattaaaacagctggattttattaattcaatctaactggtaactttagtccatttacatttgttgtgactgatttatatagacttgcttctatcacctttacaacttctatttctctcactttctagtgtaattctaatatctcctcctgggattccactaagacatattttagacctcattctgatctctccccaccaaccccaccaacttctgccctatcatctatcctcatgtctctctgtgtaacattctaacttatttttttgagataatcatctaatcaattaattctcttctggtgtctaatctactgagtttcttatttcaacaattacattttttattttgagacagagtctcactgtcaccaaggctggagtgcgcaaacatgcctcagtgcagcctcggtctcctgggctcaagtgatcttcccatctcagcctcctgagtagctgagactatagacaggtaccccatacccagctaattgtttttttagggtggggggcgtattttttgtgtagacgagttctcaccatgttccccaggctggtctccaactcctgggctcaagccatcctcctgcctcggcctcccaaagtgttgagattacaggcgtgagccaccatacccatctacattttttaatttctgtaagttctatttcatccattttcttttcaggtcttcttcatcattcctggtggtcttgctgcttgctcaattttatgattccatctttttttctttatattagatttcacatataactattttctcacaattctaatatctgaagtctgtgttctgtatctaataattccaaaacctactgtccttgggaaacatatctattatttattatttctgacaattctcaaatatgttgggttgactatttgaatgctatgatttgagtgaattcttttaatctttgggaatcctacaggcttaaattagagatgctttcctacaaaaagtatctgtgtctgcttctgatgacagctgtggatacaactaacatgagaccactttaccatcttgcacaatcctgagattctccaagagatctggctccccacccttgctcatttatacacagaagactagactgcttagtataggtagtgactcacttcctcctaccctggaaaaaacaaaacagatctctcttctgaatgtgatcacagtctaggggattctgtgggagaataagtggaggttatgggcagcagggaaagacagatgcctttcctgatcatagaaataggtcagaagctgccctaaagactgtgtgctccaggatttcactatttaactcaactaccattccctccatagtgaatggaagcttcataaagcaccatcttgcctttaaaccacaaattcttgctaaaagtcatggtaacaaacctccggctttggaaggctgtctcactaatgtcctaaaattaacattacagcctatgcttcaggttaactgaaaagaaaaccagcctgaacaacatccttatgtcccatggcttgctctcagctcctcttggttgggcctagggcagccagactgtctagttccaatccttgttctgccacttgtcacctcagacaagttatctaactaacttctgtatgcttcagttacctcatctacaaaatgcagataataatagcacctactttttaagttattaagaggattgagttaataaaaagatttaaaaaaaaaaaacttggtaagcataggcacagagaaaaaaaaaagtaaaaataaatgaaaagactagagcctagcacataaaagcttaccaggaattagttctataacatgaactcaattttttaaaacttcaaagtacatataatttttaatttactacactatacatactaataataagtttacaactgtaaacatctgtttacaaataagtttttgtttacaactgtaaacttataatgtttatctacagcaaatataacagactaaaaacagatacgaaatcattaagtgattatcaattagtatctttaattttcttataattccatattttctatagatcacttttgtaacaagaagaaaacaaaccaaatgaaaatgaaactatctcaaaaaagaattaagtcaagacaggaagaaagcttataaagtaatataaaatgtatcttatggtttatgtaaaattcttaacagaagtaccttatttgctccaaactgcactctggctttgcctttgactaaggtggcatttatttgcatgatgaccgattctattgagtaggcactgctccagccctacagaagaacaaagtatctctaaaatacagtagtatttctgattcccacttgggaaggcctaacaaaatggtatataactcaacagcagcaaatcagtgttaaaaagactgtagtcaaggggaaaaagtaaaattggaacatttccagaatctcacaaaaaaaaacaacaaaccaatgttctaagtgcccaacatgagcaaattagaaccttaaataaaggtcactcttaatgcctatcctagcatagattcagcaccaagtacaatgtcattttattggtttacctttttcattcttgaaagtagacactattttaaaaataaactaaaatttaagagtaggagctattaaagaattttctacttacaatctaatttacatgatcaaaacactaaattgtgggtgaaaatggagtatcgtaagaaaagtcacctgttttgtgagaagttccatacataatgctcctccacccaatacataccttaaaaagaaaaaaggagtcatacaaaattctcgagaattattcctccttaaacaatttctaagtgccattaccaagaaaatatgcacacaagtaaggatgagaaaataacatgcaaacatgacaacagttgttagggatacaggactatgggtaatttaaaaattctaatgttatcaygctaatgtaatccctctgaaattctagtcaattttttctaatggttcttagaacataatactttcagatttgtatgatatcagtaattaagaacttagccctaaatattccaaagaataggggcagaagaatcagtttccttaaatggcgttcacgtgttctttacatctgaacatgtwacagccatgagtttttcccctgacaatgacactgaccttaccctatccatgctatgaagatctgtatggttttatggttcaaattgtttttacccattctgttgtgagaatcaaatggttctgaccatggagcttctctctgggactcccttaagctctttctaggcctgaagactattctctgaacaaaagataacttctggggatgtaccaaatctcccattagaaaatcattacttagataacgatttttaacctttatctttctcaaacaaaatttcatttctccttcaatgttattttaaatttcaaaatacataaatatcatgccttaaaaaatcaagggaatgatagttttagaacaaaaactgtggtaattttgaaaacacaaaagctaagaccactgattaggtctgtgtggacaccaagtccaccacaaattgttctgtcctccggggctctgcccatgcctttcccttgcttgagattcctactgcttcctacccttccaaatgctgtatttccccccagaagacttgccaagaccactctagcctgcacatcttccattccagttaaccaaaggcatctttgtgtcaactaaccaaattactttgcagacaaggcatctaaaaacttttactgtagaccactaacattaataattgttayagtgacaatatttaataataaaataagggaaagaagtccttttcatctcccccatcctggagaatccaagcaagtgtctctccccacttgctttgcccaaaccctgggacctttcaaagtgaaagattaatctaaaagtgaaagaaaatctaaaagaaaaactctccaaaaatttaaattcaggcgaaggttcatrggattaaatttttttktgtgtattctatttctgaaacatagaaatctatcttccactctttaactctcctactgggctaaaagagtattgtatataatgtgcactcactgatttaacagaattagaagatccaggtactcatttagattttggttccacaattgctgaaagcttaataatcggttgatgagttaacatcaaacacaatcttcaaattttggaaatgctgatggtagacaggaacttgtttcgggaaaaggaagtctacagtagacattttacctgttatccagtcacaaccacctttcctttaaggtaccccactcttcctttgaggatgcagagtcttaagaggtggggggaagaaagggagtttttggattttcaggtcaaaaagtgcatttgtacaagtacgtaataactacacaaatgtttgttgaacacaagacaagtagttctagtacctatacaaaaagtaagataactaaacttttccttaatatacactttcagcagcatcgacacctaaaagtggccgattctacttctgtattaaattacattcattttgtcaacaagtgttccaaattcttactgctctttgcctccaaagggttcctgctgaatactgagacagttcaagaatactaaggaaaaaaacattaatgatctaagtaagggtcatctaaggataacatgccatatatatggacacagtaatactgtattttcaactttaaaaaagttcagttgccaaagttgtacagcaaacactatcctaagcttagcctcttcagatatttgatttaaaaatcactgtaaaaaacaccagtcacaaaaagccacattttatatgattctayttatatgaaatgtccaagataggcaaatctacagagataaaaattagatgagaggttgccaggatcaatggtgggggaaacgggtacagggagtgactgctaatcagtacggggtttctttttgaagtyatgaaaatgttctgaaattaggtagtagtaatgactgcacaactctgtgaatatactaacaaccaccaaattgtacacttcgaagcgttttatcatatataaactgtatcacaataaagctgttaatttaaaaaatgtttggctatgkcaagaaataaagaagtagggtcataactagaagatatgggatatgaaatacatagaacaaaactgctcaataatctatctagaatcacacaatgcttaagctttaccctgattgagatggcaagcttttacttcttcccaagtcagcaaataattcctcctcctcacttaatagttgactatgaagagcaagccattttgattttgcctccaatgagctttcacatttcattcctccttccactcccatgactaccaaaccaatgtaggttctcctcacttcactctaagacaacagcgtggccctcaactactgtcacactcttctaggctctgtgagcacaatgtgtctcatattctcttctgctgtcaccagatttactttacaatagtttctttactgtcactcccctgttyctcaaccagttatacagaaagatgaatagccagggtgatagtctacttagcagaggggraaaaaaaaaaaaaaagatctgtggccagtccacagacctgtttaagtacaagatattacatcagcactatttcctaaaactcttctacatgagtcctaccctccttgtgttatagctcaaactggtctggtatactctgagtatctcattctctttcctagataactgattgtgtttacttttcacctatgtaaatcattttccttcaacctccaccagctgaccaaacccgacactcacatttcactgcccagctgggatctcacctacttcatgaagtcttcaggtcactattgccacagcaactctttgctgctttaaacctctgataaattaagtccatggttagcatttgataatcaatggagtacttagtacttttaatcccctcttatatagctggctttggtataatgaaagacactttattaggaatcagaagatttatttgagtaggtcacaagctgacttattcaaattactcatttgaataatgagaacaataacactgtggcaaaaaagaatcaattaagaaactacgtaacagattttaaaactgaaaatggcattatgcataaaatatttgtctctattctaggtggtaaactaaggtcatgaacttaaattcttagaattcttacaataaaatgttgaaaagctatactggccaattttataatcacattttaaaatgttctgattaaaaaaaaaaaaaatttgagacggactctcgccctattgcccaggctggactgcaacctccacctcctgggttcaagcgattctcctgcctcagcttcccgatgagctgggattacaggcacccaccaccacgcccagctaatttttgtatttttagtagagacggggttttgccatgttggccaggctggtctcaaactcctgactcagatgatccacctgccttggcctccgaaagtgctgggattacaggcgtgagcaaccacatctggctgataaaaatgtttttatatatttattctgaatttgcaaatttcttccaaatcttttccttgatcttttttttctctcaaataagattttgaacaaaaaatgacctgtcttccttttcccatgcttatgggaatactgagtaaacatcacaattttataaacaagcacataaaactaaagcacaatagttggccaggcagtggctcatgccataatcccagcactttgggaggcccaggtgggtggatcacttcaggccaggagtttgagaccagcctggccaacatggtgaaaccctgtctctactaaaaatacaaaaattagctgggcatggtggcgcatgcctatagtcccagctactcaggaggctgaggcaggagaatggcttgaacccgggaggcataggttgcagtgagccaagattgcgccactgcactccagcctgggcaacagagtgagactctgtctcaaaaaaaaaaactaaaacacaatagttatgtcatttctccccaatcagtaaaggcttcgttaaagatattttaacattaaactatgaaaaacgtaagaactatgacttggtggctagtaaaagaccggtggtgtcagcaagagaaaggttaaaaatttactatttttcagwcttgtgtttattttgtatatgtaaatatttggctgggttacctaacattccacttycaaaactgatcatgaggttttatgacaaaagaagtactttttatagcaattttactgcctgatccaaaaacagtctacggaagctttaaaggtaacaaaagaaaactgtacacaattctaaacaactatttcacacccaacctgggatttccactcactgtgatagtatatttgtgatcaactttgtaacmacctgtcaaaaggaaacctctaacatctgctcacgaaggaatccttcagcatttcctgctctgcagcagaaaacacatgggaatcactcagaactccagatttccaaaagaacagcctttcccagagagtaagccagaggacaccgtcctctgagatgctatcgtgtaaattattaaacaaatttgggaaaaatagaaaacagcattaagcctccaagaagtcctttggtaaaagatattctgaacctggtttcccaaaaccttgcagtcccctcaaaacaaacatctattaacaaaccactaggtggggtgcggtagctcatgcgtgtaatcccagcactttgggaggctgaggcaggcggatcacgaggtcaagagatagagaccatcctggccaacatggtgaaaccccatctccactaaaaacacaaaaattagctggacatggtggcgcacgcctgtagtccttactcgggaggctaaggcaggagaattgtttgaacccaggaaggcagaggttgtagtgagctgagatcacgccactgcatttcagcctggtgacagtgagaccccgtctcaaaaaacaaataaaaaaaaaccccactactattagtgcttacagaacattttgagagctatggcaaagattaggttgcaggtgtcaggtaagtaaactcttaagaaacaatactgaaaaaaataaaattaagaaatatttaaaaacaaaaaaggacaaaaaataataaaataattttgaaaaacaatattgggccaggcacagtggcttagacttgtaatcccagtactttgcaaggctgaggcgggtaagatggcttcagcccaggagttcaagaccagcctgagcaatatggcaaaacaccatctctaccaaaaatacaaaaattagctgggcatggtggcatcccagctactcaggaggctgaggtgggaagatatcttgagcccaggaggcagagattgcagtgagccatgacagcaccactgcactccaagcctgagcaacaaagcgagaacctatctcaataaataaataagtaaaaataaattatattgctttaccatgtggcagaactcaaaatgagctcagcatatccatatgtaatacgaaaggttaaaaaaacaaacaaacacacactttttgtttctctgagctttacagatggacaccatgcccaaataactattctgtagtatcaacaccaaagttagtatgtattctgactacacagaaatgattcttaacaggattttagcccccaaaacacatatataagcatgtaaagcaaatataactaaaaataactgtaggaacaaagctcttctggagaaagttctgaagtctgaagcagtcactcatatttttaccctaaatgcaactattactatctcaaccatagaaatgatcaaaggaaaggctggatatatttagattttaaccaccataatgtagattatgtcacataatagaattagtcacccgagtgttggaacattctcaagttaaactgctcatactttgagggcctactgaacatttcataactaacctaacaaattgtgatcttttccccaccttctgtaagacttccaaccataaaaagaagcaatacaattaccatttgaccctaataaactgcaagtattacctctaggagtaattagccagttccataggtccatgagattttcccatgattatccctaaaagtaccaattaggatcacaggcaygtggggaccattctctaatcgtaacattctctaaaccctcaatcacaatttacatttgaaaacattagcttttttatggtaaaaagtatgtgcgtatatatacgtgtgtgtgtgtatatgtataaatacatgtgtgtatgaatcattaaaaactttacctatcaacaacrtaatgctttacaactaatggttctaggtgtgggccccagaacaacagcatcaacttcacctggaaacttcttaaaaatgtaaatactcaggccccaccacagacctactgaatcagaaaccctgggactagctctccaaatgtttctggtgcacactatatttagaagaaaaaaaaaaaatgcaggccaggcacagtggcctcatgcctgtaatcccagcactttgggaggccaaggtgggaggatcacttgagcccaggaattcaagaccagccagggcaacatagtgagatctcgtcyctataaaaaaaaattttttttaactgaaaaaaatttctttttaagtagtcacttaaacttaccctcctgagagaacaggtaacaccactcgaacaaatggaggatcaaatggaaagttatcctaaaaagcaaataagcaagtttaattaatttaaagaacatccttagtgttatactatttagaagattttaaaagatactataaagaatgtgtacatttattatcagataatgggtaagagtcataaaattagtacccaaaaccaaaatgaaaaccaaagcaaataaaaatgaagttaaaatcaggcccaaacagaacagcattatggtaaactgatgaaacacatgaaggggttccacttcactagaactatataaaggaaccattccaataatgatagactaggtaacttagataaatcttctgactgagaactagaaaggtgaacaaaacataataatttcaaggctaagaaaagggaacaccagagagcaggatctttttttcccccttaggttttcttccaattacagaagagaaaaagaagaggttcacaagctgagctagaactcacagactcacagagctcacagggagataaatactggagctcagcrtccaccgaggacaggccctgctaagtctccsgctccttaggttgggaccctgaagaacaaactgcaaattgccctgacaggkaatgacagccagctttaatcatctcattttttaagcaaattctaattaattttgatttgcattttctaacttgcaatagaaatgtaagattatccacaagataccaacttaatgacacaagataccaacttaacaacagttattatratctactttcaaataaagtagctcacctttcatctatatttaacagacataatgaaaggtatagaggttgatgtaagcttggtaaagtacaatttcatttaacctcctattatttagatctttaaacatgtgaatccctaatgagtgactacaaaacctcttcattatgtatgatttaattcattttaaacagttcagaataactcttctacatcaaaatctgcgggctctattccataaagtctataccctggaactcaggaatccagattttacagaaataaaaagttcctcagggaggaaaaaaaggttgaggatgactgttaaaatgaagtttcagttaccttagtacatattaactcagaaacagactctcagactctataaaggatctcagaaagttatctgagatcttaacatcttagccatctaagttattaaggaagaggaacattttaaagactacatcaccaaatggctctaaatagttacaaatcgcttcctcacattgagttgaaaatcacctctttgtaatttgacttactagtttcatgccctgcattcaccaaaagcaaataaaaactaatgcttccatatacacagtccttcaaatagctgaagacaagataacatcaaccctcatgttctcctctccaaatccacaatttcaccagctatcctaggacacggaatacaatcaatctcttcccaatcctggctattattctctaaatgaacctaagtttatctaaatagacccttcttaaagtactacctcagaattcaattcagtaattcagatgctgcccgaaacaccaaaaagtgacttcyttaaaaatatagcaagttggatttaccaacaaggtcacattccctcctgccccaactcccatctttgtgttatgctttatctcaagttccatttttcttattattcaagttgtcaccgtggacatcagaggccataaatatatactgttctggctctttcctgcaaatctttctgagtcatacctgctatcctccaaagtctgtgaatcccgatactaataacttggcaattcagtttaaggtcctcttcataaggtcagttagctcaaggcaatcacattcttcctaggcctctcaagaaatactccaaccccagaaaaggcccttctttgtggtatcaggagccatggtccagaaacacaaatccaayagaaattcagccatttacctcccagatcgtcccctccctgaagttctacctagagcaggaaaaaataatgaaaacactacctatagtcacaaatcctccagtttcctggccaatatttcatattcccgtaaagatacctctcaaagaggaagtgacaagggaggggcacacagggggcyacagggayggataaaaaaaaaaaaggttctatttcttaagtttggtgttaggcataaggacatataattyaattttttaaaaagaaagataccttccttttttgtgtgttttgttttttgtttttggcctgggtgctttattcgttcccccatatgaattagtaaaaatgtagccattagcaacttcagtcaatatataccagactcatattttaggaagacaacccagttgacaaccacaacagtttctataataacaaaagtgagagataatactgacatttgggtcacttcaagaaagttcaatcataagatatatccccaagcaaaaacacacacataaaaaagctacgtaagaagcttttagaaaattactaccttttttgtaagtacaaaggaagtattgctttttccatcaaaatatctcatatatccacagattttaaaccattacatctcatccagatccatattaaatcaygcctgtaatcccagcactttggaaggccaagggaagtgtaccatgaggtcaggagttcaaaaccagcctggccaagatggtgaaaccccatctctactaaaaatacaaaaattatgcggacatagtggcacatgcctataatcccagctactcggggggctggggcagagaactgcttaaacccgggaggcagaggttgcagtgagccaagattgygccaccacacgccagcctgggccactgcactccagcctgggcaacagagcaagattctgtctcaaaaaaaaaaaaaaatcattaacattttttctagattccattgctattctttaaccattatttttagcatctttaaaatacttattaggccaggtgtggtggctcacacctataatcccagcactttgggaggccgaggcaggcagatcacctgaggttaggaattcaagaccaacctggcaaacatggtgaaaccccgtctctactaaaaataaaaaaattagccgggcatggtgacatgcacctgtaatcccagctactcaggaggctgaggcaggagaatcacttgaacctaggaggcagaggttgcagtgagccaaaactgtgccactgaactccagcctgggcaacagagcaagactctgtctcaaaaaacaaacaaacaaacaaaaaaaaaccttattaaatataacacataaattcagaaaagtacataaaatatagagatataccttaagaagctattgtaaattatgtgctcatgtaaccatcaacctggcccagaaatatattccagccagtatccaagaagcctgcgcagatatacctttcagttcacacctccctacctcccacctagatggactccttaccctaacctgtatgtaatcacctctttgttcttggacagttttcctctttgggcagttttactgctcacgtatgaatccataaataagtgtktctcagwtttcttttcatttttgcccccctaagaagcctttttagaagttttcttcctagttttacccccctgctccatggaattttaacaccatagataaatcgtatatctgtttatgttctgtggccctttggagggcagcagaccattttaatagctaagattgttttcactctaaagatcagttttcactacactgcaggtgatattgcctccactaagaatgcatgccctaatcaacattagttttacctatttttgaactgtatataaagggaattgtacaaaataggttttggagtccagtctcttttacaactgtgttcaagatccacccatcttgtcccayatagctgtaaaccactttataaacaccacaattctccattttattggaatgaacacttgggttttctatttggtgctattataaacgatgctgctctgaacattcctgtgtctcctggtacgcctaagtactcacgtcttaacggagaatatgtctacgagattcctgaaccatagggtatgagtatcttctactttaccaaattgttttccaaagcacttgtacaaatataygcaccccactggaagtatatggggtcctgtaactattttcttaccttaaaagagaagttaagcaaaatatattctatgccttctttttcttttaagatctgaagatcactgtgcaaaggactatcagggtcaaccctaagaattacaaaacaaaaaacagttcaaataaaaagttagagatttttttttttaactaaactcaaaaatgaactagtatgacagctaaaatagagcacctagggcaagttccagaaagagaaggtctaaagctgctctgtatcaccaggaaaaatagaggtcaccataggttccagctccttgggaataaatgtccaaaagagaccataatactctaaatctaatctagtaarggagttcagagtttgcagtcactctaaaggaaaatagtcacatgwatataattttytcaagaactcaaaaaaagtttaggaaagcatattaaacttacattattagccaaagggttcaaggagaaaagtttgccatggtcagaactatgaaaacttaaatcactaaaaaaacctgtatttgtctacaactgtcctatatawacaggtctaatttgaatcccacctccccccaacttttttttttttttttttttttttaagagaccgggtgcctcattctgttgcccaggctggaatatagtgatacgatcgtgactcactgcagccttgatgtctggagtgcaagatcttcctgcctcagcctcccaccacccccagtagctgggactacaggtgtactccaccatgcctggctaatttttttttttttggtagagatgaagtcttgctatgttgcccaggctggtctcaaactcctgggctcaagagatcctctcacctcagtctcccaaagtgctgtatatatttcaaatataaactggttatcacagtctcatgaagttattaaatacacttttgtttttaagttcccctgctctaactccataaaacactttatcccgcagctggtccctctttctgtccttcctctttctcactttcttattagacctcagcaacagctcatttaaacaatctaagaactatttctatagaaacaaagtctaaagttctaagtaaaagccatagtataaaggtatcaagttagaaggaaaataacctccactgtgatagtctaccattgcaaagagtgggtgagcattaaaaagccacttacttctgcagtttaacatgccagtcatataaactgtcatttatgagttccactgaataaatccctgttaagatatagagcatgttagctactcttcatttcatcatataactattactatggtataaatgtatacactaaatagccaacgaaagctagaaattttgctcttaaaacatggaacaactaagctatatagtaaatattacactactgcagctgagtatcttatgcccttaacagataattacagccatcaactgagaagattcttyaatgagttgaaaaactgcttaccgtttagtctgactgaaaaaaagattatgcaaaatcatatgtacttaagacttttcttccatgaacacacatttctacaaagatggaatccttctacgtatgttgttttataatctctcttcaactttcagggacatctttccaagttagtatacataaacctattcacaatctttttaatgactctgtggtagtttattttatggatatgctttaacaaattccacccagtatctgtttttttttttctatataaacaatgctgaaacaaatgattatttaacatttaaaaataaaaccagtattcaaatgtttgtactttattaggtttctacagataaacttttagacttcttacacaaaaaaccgtaaggacacccacaattctaacaactcagaaacaagtttggcttatcctgcacactacaaagcaaggattttttccttgtttttattctttaagcaaattctaattaattttgatttgctcacgctaagaattcctgaatcggtcataatgctagaattgaatcggtcataaccctttttttttttttttttttttttttttgacagagtctcactcttgctgcccaggctggagtgcggtggtgcaatcttggctcactacagcctctgcctcctgggttcaggtgattctcctgcctcagaccactgagtagctcggatcaccaggcgtgcgccaccacacccggctaattttttatttttagtagagatggggcttcgctcgccatgttggccaggctggtcttgaactcttgacctcaggtgagctgaccaccttggcctcccaaagtgcagggattataagtgtgagccaccgcacccaaccaatgctatcttttcaaattaaagtttggctcattatttaatactattagaatctccataacaatatgagaattttacctctagttagagaggttccataacattcaagtcatattgagtaagaatactcgtcaaacaaggaaatgaaaactttaaaaacttatatattttaaaggtaataacataactatctttacaataaaagctgattatcttgctttcaaaaatgggggggaatcataaaaatcaacttggcaattattctctgtaaaatgaaatgttttactcttatttactttccaagcaatatcgctcatgctttccccagaagataaaaatcatgtaagagttcactgtttatcaagaagaggacaaaattccaatggacctataaaaacattttttaaaaatccaaaagacaagtaaactcatcctattttactcctacatcttttggaacttgattgcatttgagtttcacattcctgaaataaagctagtaaacatttccatttctgtccagttttaagaaatgacatttataatctgacaatagaaaagagcagaagaatcataaagagagcagggatccagagatccttacctgttttataactctgtgatctgtatatgtccctgagctctttcataagtctatctgaagcttgcactgacccagacactgcaccctgaaacacaaaagccactgtttaccagggtctgctgagctaagatttaagatatttcaacctgatctaaaagattacagcaaaaatggatcaccactcaacattttttttttttttttttttggagatggagtctagccctgttacccaggctggagtgcagtggcgcaatctcagttcactgcaacctccgcctccctgctcaagagattctcctgcctcagcctcccaagtagctgagactacaggtgcgcaccaccacgcccagctaaattttgtatttttttttttggtagagacgggatttcaccatgttggccaggatggtctcaatctcttgacctcgtggtctgcctgcctcggcctcccaaagtgctgggattacaggcatgagccactgtgcccaacctcaacattttaagaagtaaaaaaaagcccaattaaatgaagcattatgaagtttcaagaggatattaaaactaggcacaagtctagttcatttcctatttcttctcatgtgaaaaagtctagccaacatgtccagaccaccatggattccacaataacaaagaattcagtatgagtctattccaaaccccagcaatttttgaaaatactagaagacactcaaggtgacacattatttactaaaatagagttccattcataagactacaaacaagaatattacacagatggtctagttcgcacattaagacactgagaaacatctgcctacatgcgactggtttcagtttttcagtgcagggacatctctaaagatgaaaacacatcaatatcttatcataagactaaatacaaacggaactattttttggtcacgtgaaattaaagattttaaacattgcactatactttgaaggggggaaaaaatcaagtttcctagctcatttcatatctacaaaatatgagaagtttttcctatctctaaaatatgaagcatacctatttcacacggtggctatgaagactaaatgtgaagatatgtgaagtataaagtacttggcatagtatccatcatgcaraagtgttcagtaacttatagttgttttgactataactcaaactggaatcgatcacaagacataaagtacagtcatcattaattcaaatgacaaactttgttttttaagtaatcaagatatgggggcttgactaaatttctttgctctactaaaaattataaattagattaatatataaattagactgaaggagggagagtaatctacctgttttcaacatttggcatctacttacctaacaattcattccctgttttggggaacctgtgcccaagacaaagtaactgctactcagatttcacggagttggtcaatagctctaacacaaggcaaaaagtagtaagtgttcagacaatcatttgatgtttccctactctgagcattttatatatatacacacatcattttcatttatttttgatagcaatcatccaaaaggtatgtactgtctagccatattttagagctgaggaaagtgaaaccataaattgtgtgtttgtcaccagactcagtgttcttttcacatcctgctgcttcacgtaaaagagatattaagttgtggccggacacagtggctcacacctgtaatcccagcacttcgggaggccaaggcaggtggatcacttgaagtcgggagttcaagaccagcctggccaacatggtgaaaccctgtctctactaaaaatacaaaaattagccaggtgtggtggtgtacacctataatcccagctgcacaggagggtgaggcaggagaattgcttgaacctgggaggtggaagctgcagtgagctgagatcatgccaccacactccagcccgggagacagagcgtaacttcatccaaaaaaaaaaaaaaaaggatgttaagtcaaaagagaaaaattacttttggttgggtcagagcaggacagaccaaagtcagcttcacgaaggagaaagaacttgaattgtattttgtcggagaggatgaatttgaatatacagatcccatgagaggaaggtaagcagagaaaacagcataaacaggccgggaaggggcaaatacagggatcagcaggtggttccaggatatgaagagcagatgaacagggtaaaaagtggctatctatagataagaaacgtaatctacagcaacaaaacatatgactaaggctaggcacggtggctcatgcctgtaatcccagtagtttcggaggccaagatgggaggatgacttgaactcaggtgttcaagaccagcctgggcaacagagagtcctcatctctactaaaaataaaaaaaactagcctggcatggtggcatgtgcctatagtccaagctacttgggaggctgaggcagcaggattactggagcctgagagatcaaggctactacactgaactatgattgtgccactgcactctagcctaggcgacagagcaagaccctgttttaaaacacacatgactgaatccaccactaaggcagaaatggaggaagagggcagctgagatgggcatgttaatgaattgcctggtattaactacaattatttaaccacaaaagtccaggttctagatatctacacacacttacatttaaatggtcttgcctttgagtcttcctaattttctctaatattgccaaattttctttttcaattccttcatcctctgactttttcccactaataggctcttcttccttcatctcatagtgatctaagtcttctatatcctacaaagagacgaaaaatgttagcttattcaacctatttttcttcagcagtttcttatgccaaaataacattaaattattcttgactcaaatgaggaacaagaaacaaaatgtaactatcctatagggagagagaaaaagcccccacattccattcaagaggctcccaccttttatatcctrtattttatttaaaatctagactctgggtaaagcagatttaaaagctttacaaaatcataactattaccaaataagccatcttctaaatctcctattaagaggaacctttaaaacagtttagcagcaggtgtcaagaaccttaagtgttcctagtttgttccagaaactcaacttctagaattgtattctaagaaactagtttaaactataaacactaatttaggcataaggatacctatttcaaccttgcagccacaaaaataaacacaaaatctgcatgtgcaaaatagcaaaatattaagaggccactgaaatactaacatagcctaatttctcctgtaacgaaaaactttaaaatgaaaaacamtacaaaaaagaatagaaagaatttcagttacgctgaaataagcacagaaaaagaaagaccagaagaacttacattgaaatgttaatttcagttaatcttagttatctctggaggcatttaatgctttcccctaatttccaagttttatgtagtaagcatctattgacgtttataactagaaaaaaagttagaaaaagaattttatctcaggtcctcaggaggctgagataggaagatcatgtgggcccaggagtttgaggctgcagtkagctatgatcatgctactgtactccagcctgggtgacagagcaagactctatctcaaaaaaaaaaaaaaaaaaaaaggaaaagaaaacaaagaatttgaatacccctagaccaatatctttattcacatcattctgctcccttctttcccgtactatctgttcttacacatatataaatctatgcagaatttaaatcctaactttttgcaattaccttatttctctacttcaattgccaaaatctctaaaggagtagtttatacgcatctcggctttttttttttccccaagcaggctaattcactgatttctagaccaggttaatcactaccttctatccattcaataggcctcctttttgggtttatttttttattttttgagatggagtctcgctccgttgccccggctggagtacagtgacaagatctcggctcactgcagccttcacctccccggcctcctttttggaatgccatctcttcaagccctataacgttctgttctcactcaaactctgcccatgactccatacttcattgagctcccttctccctgtgtgcacctttcagccctgatcttccatcctacatgttttcctyacaattctcacaaatgcctttagcctgtatttcctcctataccttcaacctcagtcatgttcccatccacgaaatttctttttctgagtattaatcagcacatcccaaacagaattcaacattatctttctcaaacaatatcctcagcacactattccctgcttaaggccttcctatcaataattrtggggaaaagcaagacagatcagcctgttactgtgtctgtgtagaaagaagtagacataggagactccattttgttctgtactaagaaaaattcttctgccttgagattctgttaatctttgaccttacccccaaccccatgctctctgaaacatgtgctgtgtcaaactcagggttaaatggattaagggctgtgcaagatgtgctttgttaaacaaatgcttgaaggcagcatgctccttaagagtcatcaccacttcctaatctcaagtacccagggacacaaacactgcggaaggccgcagggacctctgcctaggaaagccaggtattgtctaaggtatctccccatgtgatagtctgaaatatggcctcgtgggaagggaaagacctgaccgtcccccagcctgacacccgtaaagggtctgtgctgaggaagattagtataagaggaaggcatgcctcttgcagttgagacaagaggaaggcatctgcctcctgcccgtccctgggcaatggaatgtctcggtataaaacccgattgtacgttccatctactgagatagggaaaaaccgccttagggctggaggtgggacatgcgggcagcaatactgctttgtaaagcattgagatgtttatgtgcatgcatatctaaaagcacagcacttgattctttaccttgtctatgatgcaaagacctttgttcacgtgtttgtctgctgaccctctccccactattgtcttgtgaccctgacacatccccctctcggagaaacacctacaaatgatcaataaatactaagggaactcagaggctggcgggatcctccatatgctgaacgctggtttcctgggtccccttatttctttctctatactttgtctctgtgtctttttcttttccaagtctctcgttccacctaacgagaaacacccacaggtgtggaggggcaacccaccccttcaaataatcacaccaaatagaaacacacctgtctcgaattcaagacttttaaccatctgccttttctagccaatcttgttttttcatgacttccacccatcaaccctcctcaaaagaaaagtatccaatgaactcaaacacactatgtccaaggttgttctgagcctgttcccatattattttaggagcctagaatatcttctttccacttgtcctaatctgacatctccaaagtccagtctacctttctaggtttccctccatgttgcggccccttgtttattatcttatgaggggaaaaagaaaaagttcatgaactttagtacaatggctgcttcatggtaaactgggcgcacaaaaaaggtttaatgttttcatgcagtttattccacctaagctaaactgcataaaaacattaaactctcattctaacttgacagttttaagagtattttactcccagactcataaaacaagcctacagccaggcacagtggcgcatgtctatatgtctataatcccagcactttgggaggccagtggtggatcacttgaggtcaggagttcacgagatgaacctggacaaaacagcaagacccaatctctacaaaaatttttttaaaaagcttggcatggggcacacgcctgtagtcccagctactcagaaggctgaggtgtgaggattgcttgagtccaggagtttgaggttgcagtgagccgtgatcacactactgcactccagcctgcaccacagtgagaccctgtctcaaaaaaacaaaacaagcctacaacactgcttctttagttctgaagcattctaaaagcacattttagattaaaaatttccaaatcaagaaaataaaagcataattataagacccaaaacagaaaaaaaaatttttttttaaatcaagaccatggaattcacatatcctctatttggtcaacgcagaaacaaagatctttgttctgaagtttgaatttaaatgcagagcttcagagcttgaaaacatctaaaattatatccatgactgacaactggcctaagctcaatgtctttggaatgcactctactaaatttgctatgatttaaatgtgctccctccaaaatgcaggtgttgccaatgtgatgctattaagaggtaggacctttaagaggtgattaagccaagagggctccttcctccttaatgggattaaggcccttacaaatgaggcttcacacaatggactagcttgctctcctgcccttctgccttctaccatgtgaggatgcaacaagaaggtcctcagacaccmaatgttggtatcttgatcttggacttcccagccttcagaacagtgagaaaataaatgtctgttctttataaattacccagtctccagtattctgttaaaatagtgtaaaccagattaagacaaaattctttgatgatttttcaacaagagacagtttcactacttctggcgagtagtccctaaaatgttctcaaattctccttttatgcaaacataaaattttttaaacttagtagttcctcttcctaaaaataaccaaatacagattaagtactgattagtattaaacataaatataattttggtgctaaatgttaaaagcttttgttttccaggaaatcaaatccaaagaattcagataaatttgctcaaaggcatatcattagttagaggtaaagccagagttgggaaattatattccattccaaacacaatgtgctttcaattattccacattaatagtagtctataaaaaagatttgagaattactcaaatgttcaaaaatgaagaaatttatgaactcttcttttatataaaatacctacttcagccatctcttcttcttcttcctcttcttctgaagtcacttcttctgttgtcccattctgaaacagagaaagaatctgccagggctatacagaacaaatatgcacaggctgagtacattagaagactggtgccacaaactctcaaacatctgtcactggagtcccactaccagacagtttattaaaattaaaatgtttatctttaaatccagctttgactaacaaataagttatcagcttttaaaaatgaaacaattttgaacaattcaacttaatggctgccttaggaacaaagaaaagcaatcaaatataaagcaaaacagaaaaaaatgttaaaacataatctaatttaaaataagaaaacattttacttatatggctatatgcataagatcaayggcttatttaaaataaaatctcccaaactaccgattccttaaaatagctccctttttaactttggaaagcctgaatcatttacataaattcaattgccttacattttgaacagtcagatgtgttattgataatagacatttcacaaaactaagaattatgaaatgattaccacctcactaaaaagcaaattttctttttaaaaacattttacaacaaaatacttccctacaagacacaacttaaccaatttacacaatttacaatttatcaagttcagaaatgaatttgatggggttttaggaaggactttcatatccatttttgacaaagttcaaaaggtaagccctcgccaggacactgtttatacatgcatctttaaccatgaaggccagttcaggttagaacacagaatatgtaaaagatcacgaaaccaggatccagagatcaagtaagaccaacaaaggtctcggcagtatctaagcatctgttattagacactctgatggaataattctcaagaaaaacaaacccatgatcacagagggtattagaactcttctggattagtcagctggagaattccatgtaaacatacccatgcagaattaacttgtatttcctttaaatctgcatctctttagacacattgtcttctaaaaactaatggaaaatggaagcaagcagcttccaaaatgtaattctcccttttttcatttccctaaattgttatattccaaatcaaactattctgggtatctaaagactatatacctagcctaaaactcccaaagagtttggttgcatcaacgattgaaagagcattttcsaaatgccaatttcaaagcctacccagagaatctgtttttcaaaagctctctgaggtgattctcacatgcatctgggtctgtcaccatcagcccagttactatccctcattttaaaatgagaaaactgagcccccatcacctcaaaaaggggaagtaatttaatcaaaacaaaaagtgagttaatcgtgggaaaccctaagatgatttcatttcaagatgtggcctggtcctcttttcaaaaccccactgaaatgacagaattttataaaaaaagagtaggtctgccgcagtagcagaaaaacaaatacaaggagaatacccttagtgaactaaaactataaggacatgctggaagatacaaaggagatggaatcagactgctgggcttgagaaagtcacagactcaatccaaataatgcagggaccactttttttcagaagaatcagacattctttactgtacttgtcccatctacagttggtaaggatcactctcctatataggaaccctatcttgatggcctctatgagtgtcaaaaccagacagaaaagacagagagtgtttttagtataactcaatgcagcagcaaaatcttagactccacctcttcctttwagctcaggagctggaaagctcaccagccagcacctccccatcctcatgccataggaagagcacaggtctgcaaaccaggagggggaggccacagtagaaaagagtgacaattctgaagacactcaggtcaacaatggatactgatcaagggtatatctcatctataaatgaggagataaccaggtatcaccagagagctgaagaaaattagcaatctgaaagtgccaagtcaagtaagcacaattgatctgaagcattactaatgaaggaaataaatagaattttaaaacctaattgggatctttagcagtaattgggaagatactgcatccacaaaataaaaaacagattactatgcaagcacaattctagaaagtaaaaataagatcccctccacccccaaaaaaccacytgtagaagggccagagtactatggacttgacccaacaaggtatttatgattaagaaaaacaaacagtgacatttccttagaacagagaaaaaaaggagatgggggagaaaayagaagagatgtaagtaagagaacagttaagggacattgaagatatagagatctaacattcatccagaggatgaaggggaataaaaagaaacaaaagagacaagtgctgctgagctaaagaaagactttagaatattaagtggctctgaaagccccataggaatactgaaggccggacacggtggctcatgcctgtaacactttgggaggccaaggcaggaggatcacttgagcccagaagtttgagaccagcttgggcaacatggtgaaaacacatctctacaaaaaaattttaaaaagtagccatgcacggtggcagtgcacacctgtagtcccagctactcaagaggctgaggtgggaggactgcttatgcccaggaaggtagaggctgcagtgagctgtgatcacaccactgcactctagcctgggcaagagagcaagaccctgtttcaaaaaaaaaaagtaaaactgaaaagtaaaacccccacactttacagttacagagaaaatcataccaactaccagaaagaaaaaataaaatacacagaaagaattaagaatgagataggcatcagacttttcatttgtaacaaatatcagaagataaaagcgtaaagaactgggaatagactcaattatgaacttagaattctatatctagctccatcaagacaggaagcattatctgtgtacgttcacctccagattctccacaccaatgtggaatactttatacagagtcagatatttgttgaacaaataacagacagcaagtattcaagggacactctccatgcacatccctttaaaccctttytaggttaaaaaaaaaaaaaacaaccagatattattcagggatatacttgaggggcagggagcaggacacataatacaaggagcagcaataagaagcaaagacagcagtaacaccaatagtgaagtctaaacgattactgataatgcagctgaaaggtcacaggccatattctctgaccatattgatgcactaaaaataactgaaaagccatctgaaaatgctttttaaaaagttttttttttcctarataactcttgagtaaaaraaraaattgatcctcatgcccctaagtatgtgccccararaaatgctggcacaggggtaccatgaaatacaagcaagaatgatcacagcagcattcgctgttcctaacactggaaacaacccacatgtctgtatccagtcaaggggataaatggtagggtgtattcaaacaatggaataaatacagcaatgcaaaagaactatagctacacacaataggaacaaatttcacacacaatgttaagcacaacaaaggtacgaaaaaatacatacagtatgattttcaaaagttcagcaataggcaacactacactgtattgttcaaggatgcatacataagtggtaacactagagaaatgtaaggaaagatgagtgcacagaggaacagtgatcaggaagaagcctgcagaaggtttctgtagtgcgagcaatgttccttctcttcacctgggtgctggctaggtgttggctcccaagtattcactctaattatgagttacactaagcttatgttttacatatttttaatacatgtcatctctcacaataaaaagttttaatagtatggcaatgtgaacaaatgatggaataaacttacttagaaaacagattttaaaacttgtgcaataaactcaaacagcacccaaagaaaatgtatacccttacatgtttgtttaaaaagcaatttaaattacattaatccactaaactagaaaaagcaaaataaaaaggggaaataattaagacataagcaaaaaatgaaaaagaaaacactagatttaaaaaataaaactaaaagaggattctttcacaagactaataaaacagccaagcctctgataagtaatcaagataaagaaaacttttgaagtgaaaacggcatatagccacatgtgaatatgatgcaacagcttagaagtatacatgaagcgatccttttttttttttttttttagaatctacagttactaaaactgaagaagtggaaaatctggagaccgatacatagaaaaaggaaaaagacagtcaaagactcatcctccagattggagttttatttaaaccatggtttctcaacctcagcaatattgacrtattgggccagacaattctttgtggagggttctcctgtgtgttgtaggatgtttagtgacatcccctctacctaagaaatgccaacagcacccctaccatgaccagttgtgaaaaccagaaatggctccagatatttccaaatgtcccacgggaggcaaaaatctcctccagttgaaaattactgtgtaaacyagatctacaccctagatcttaggaaaaaagatgtaaagctttccaagtcacccctgcatacccttgatactgaaataagagcctaaaaggaaacaaagtataaccttacttaatatagaagtaaaaatccaaaaataaagtattaccatatccattctaacggtgtttactatagaaatgcaaggatgattcaaaattaggaattcataaattatatccctatacagaatcgtgggcacaatcatgaaaaaccaggcagctctctatgcattaagtccatgtgatattcagtgaaaaasacaagctgcagatgtcttacagaaggaaaagtgaggggccaggtgcagtggctcacccctgtaatcccagcactctgggaggccgaggtgggcagatcacaaggtcaggagttcgagaccagcctggccaacatggtgaaacccctctactaaaaaatacaaaaaattagccgagcgtggtggtgcacacctgtaatcccagctactggggagactgaggcaggagaatcgcttgaacccacgaagcggaggctgcagtgagccaagatcgcaccattgcactccatcctgggcgacaggcgagactccaactcagaaaaaaaaaaaaagactggccaggtgatcayagatgtttataaaatatcagctggccgtagtgacatgtgcctgtaatcccagctacttggaaggctgagaggcaggagaatcacttgaacccgggaggcagaggttgcagtgagttgagatcgcgccactgcactccaccctgggcgacagagagactccgtcaaaaaaaaaaaagaaaaacaaacaaacaaaaaaaacagaaggaaaagtgaatactgaacacatatttctcccatctgctctttgtcctgaggctccactagaattacggtgaagaataaacacacaattacaaaaaaggaatggggttaccggcagaccagaactcacctccactagacaatgacagtaaatggaaaatagttaattaatggagcaaagccaacaaaggtggaggttasggggatattgacagcaagaaggcaaatttatctcacagcgccctgaagaggctctagactcagacactaggtaccccagaaagtgggacagataggcaagactgtaaacagattaacaaaagcctatatacagaacacattttccaggccctgaaacacactgttctcccacatctccttaagcagaacctaagcaaacatacatctacctcaggcaaaagaacacagatttcatctccagaggaatggagtagttccagccatcatttatgattgcaccaggagataagatagaggggtagggaataacaattgggaatcagcctaaattcccactaaaagctaccagtcttggccacaaagaactcccaatcagtctttcagtccttttttttttttttttttttttttgagatagggttccattctgtcacccaggctggagtacactggcatgatcacagcccactgcagccttaacctcataggctcaactgatcctcctgccttagcctcttgagtagctgggactacaggcaggtgccaccatacccacctaattttttattttttgtaaagatggsgtctcaatatgttgcccaggctggtcttaactcttgggctcaagtgatcctcccacctcagcctcccaaagcactcagattatacgtgtgagccaccacacccagcctcccaatcagtcttttagtacctctctcaaatatgaacaaaaaagggaattaaaagactacaaatgatgagcaacatagaatagatacctgaggaaaggtttaaaaaaaaaaaaagaccaaaataaactaagaaaaaaatttattaaagaaaaaagagatgctagggagagggccaaagagtatcaaaatagctccttaaagacacttatgaatacaaccatggaacaaaaatagaatatgaataaaaaataaccagcgaagaaaaggttcttagaactcagggctcatcttgggagttggtcctcaatgaaccacacctcctgtcatcacgtccttggatgggcccatcccacagtgagtctgggttggccctgagactcactttaacctacagaatttggtagaaattatattggacctgttccagatctaagccttaagaacacctggcagctccacttctgtgcttctggaagccaaaaataggaactgactatcctcttggagaaagagaagccacatgaagaggcccgagaggatgagacgctatgcagagagaaaggccagatgaagaaacaccaaggcagcagacctgtgggtgaagaagtcgtctcagacattccactgcagctgagcatccagatgaccagtccctgccaccgtctaaaccacatagtgagagctgccaaatgagaccagcagaaaacctgtccaactagccccagttaagccatacaatagtgatagataggcaaatttgttgttttatgccattaagttttgggataattggttaagcaacaataaataaaacttaaagctatgactgtccaaataacatttccaaaagttgaaagaaaaatatttcagattttaaaattaaagaaaaataatttagaaataatatgagatacaagactcaagacaagaggtctaaaatcccattaacggacacttcaaaatgaacaaataaaatggaaaggagaaagttaacaaaattatgagaagattcaagattccaaatttgaaagagcctatccataggcctatccatttggtgtactgagcacaatgagtgaaaaaagacccacactaagtatactgttgtgctgtttcagcacaccaaggaaaagacaaactcctaaaagcttccagagagaaagccatacataaatgactgaaactcagaatgscatgaggcttcaccaccacgactggttagaagacaacagcatagactttgaaattctaaggtaaaattatcttcaacctagaaatatataatcaaccaaactaccaatcaagtgtgagggagggtagaatataacagaagtcaacgttgatggggatgtgctatgcaccaggcactgttctaaatggtttacttgtacgaactcatttaatcctcatagttcccccaaaacataggtactaatattattactggttcccccattttgccaatggaaaattgatgcatagagcaattagggaatcagcccaagggcatacagccagtaagtagcagaacaaagattcaaacctatcacggtctggctccaaaaaccaaacactggacagtatttttcagaagctagagctcagaaaatgtactcctccatgctttcttagggttttacctgagaatatagtcaggcaaaatgagaaagggtcagccaagaaagayggcatgggatccaagaaacaatggatctactgtaggagagcagatgagaaaaacctcaagatggcatctgcacagccaacccaaagaacaacctgccaagatgggcacagaggaaccaaaggcttcagaagaaagggaaacctcacagaaagggctacaacagaattttttaaattaaaaattactattatgaggaagacactgcaaaacaaaaagctgcaccaagaaaggaaatatcctatcttaaatattctagaaaacttggctttactctacaaagtcctaatgataattagtgattacttatatgactaaagataatatttgaggaaggggaggtgagtggtaagtgggtggtataagagctaaattatcatgtattatagtaaaaaaaaaataaataggtaataaatatttagatgcctaaataggtaaatccagaatgaaattagtgatggtggtgagctagtggaaatttctgttgcttgcaggagataacatttggtttagtctttaaaaagcacagacagacttaaggagatgacattgctaggtgaaggtaattgaataaccaaagacaaactatgaaagaagcaagagcatttacggaaaccagcaatattaacaaaaaggtggtggtagagagaagggcaattgtttgcctgtatagtaaataccagcagctccaaagaatgaaaagtttatttttagtacctaaaacagaacaaacaaaacaattcaataggaacaaaaatgaaactaacttctaaataagttgaacaataaaaagaaaaatcatcctagtttgacttttgcttgagacaatttatttagctcttgaacactagagaatttttactttacctgacccgtgggtagtggttgatctagcatctcaacatccaggtgcttaggaaggttatataaactgcagagttcacatatcaaccacttcaattgctgacgaagctacaaaacacatttcagtaaataagcattatgttaaagagcccttagaagacatcaataatgttatgactactgtaatcaatccagtaggaaatgaaaaagtttgttactgctcaactgcagcttacagatttaaaaaatagtctttaaaatattttcaggaccctctagtgtaagaaagttactatggcttggggtataatcactacaactgatacctagcagaatgacaacaataagggcagaggaaggaagttccagacattgtccaatttctcactgctaacccgttttctgagaaacttacaacttcagacaagagaacattaatgcattaatgaggctaccaaaaaaataaaaacaaaaaataacagaaaaaataacccagacacacacaggcagtgttgttacagatggattacaaaattatatattccagtcatattcatttaaaaatacagaagcaaatatctagtagacagagcctggcaatctagatgaccttggatatcctatctaattccctgagtatgagtctacccatctgtaaaacaaagaaatgaaaactttcccagaatggtaaagattaaatgaaacctgtaacacttgatatttagtaggctcttaagtgtctgtataaaaaataacaataattcactaggaaaactgcaaagaataactgtaaatttccatgtttaagtccagattgttttctaagcatatttgctttcaacaagtaagcaaggtaaatcatgtgcacaagtatggtgttcattgtttaaaatgtttttcaatgtataacgtgactcaaatgggatctaataaggcaactcacttaactcggtcaggaacagtttcctaggtggctctgaccaagaaaagagatgaagagaaagaagcaggtttacaaaggacaaagaaagaagacataggattagaatgggttaacgaagcaaagaataagctttcccaaagtggacaacggagcaaatgaaaatgaggaaggttgaacggtaaattacgatccaacaaaaatcttcatgcttaaamggaaaccaagctccagtgtggatttgatatccacccaatacactctattgcgtgctaagtgcataatgaagatgaggcagagcaatcyggacacagacctagmcactctggcctctggcacggaaggggctccaggagtgctggggagagaggcagcagggtagtggagtcataccaagcaacaagaaagacagggtagtacaytctccacgaatttcaattttcctcccttcccccacacaccaaaaaagcatttgagggatgggaggaagaaactgagatcacagggaaaatagtaagagacattcaraaggacaggtcttagaaaattactagtttgcggggggcgggggtcagagaacagtagtatataaaagaacgctaagacagttcccaggtttgggtatgggtgactagtttgattatttcattttgtcccactcacaatcacaagaattactgagaaaaaacacggggctgatagagtgctaggaggtgggtaaacgcaaatttaaacgtcatcattttgaatatccatggcactgtaagtgagattccctaacatatatgatttacagacagatatatgggtttgaaactctggagatgaatacagatttaggaatccctagaacagagatcatgactaaagtaatgggagtaaaatattactcagagaaagcacagaatgagaagagaagaagtaggccaagggagaagagatcagaggagaccaaggcagggtgataagatcaaaacaagacagtaatcagatggaagttccattagattatcagttcccagaggacagggacatgccttgtcttttatactcaattatcacagagcctgacacagaagccaatttttcttaattgtgttctactattgacagtttcctgtacccaccaggaaagaaaaaagtataaacaagcatatagattttttttacattatatactaaaggggccaattatacacaatattttatgccttgctttttcatttaatatatcttagaaatctgcacatgctcttatggaaaaaatggctgcatttttttttttttttgcctacaacagaatattctattataaaactatacactatgatttttatttaaccaactctttattggtggacattaagaatgcaggaatgtttcaacaagggaacaatcaacagtatcaaaatactgcagaggggtcaatttggggactaagagaggagccgctagttttggcaactaggagataaattttagtgcaatgatgaaggcagaatccagattataataacttcagcgaaaaaaggtgaagacatgtagcttattctctcaagaaactaggttttgataaactggcagaggctgcaagagtgggaggtgagttgttttctccttcatgtaaatatattcacttttaaaaaactaggcccaattttatatcctatttcatttaaccttatgaacatgtttatgtaatattttagatactgaaaaataactcatttttgctattacaaaaccgttatctttagatcttcagaagcaacttcctaaaaggaggtagcagtaacagaactatgtctaccactctttcccatcaacccccttgctggggatgtaaacatgtgtccatctagcttttaatttttacctcttaccttcatggctctccatacaaaccttaacatacgtacgtacgtgtgcatgtgtgtgtacagagagagagagaaagagggtcttgctatgttgccaaagctaatctcaaactcctgggctcaagcaatcctcccacctcagcctcccaaagtgctgggattacaggcatgaaccactgtgccaagcctcagccttaactcttaaaatatcttttttttttttttggagacagagtcttgctctgtcgcccaggctagagtacggtggcacaatctcggctcactgcaacctgcctcccaggttgaagcacttctcctgcctcagcctccaagtagctgggatcacaggtacatgccaccacacccggctaaattttgtatttttagtagagatggggtttcgccatgttggccaggctggtcttgaactccccacctcaactgatccgcctgcctgggcctcctaaagttctgggattacaggcgtgagccatcatgcccagccttctgttcttaagaatagatgtgtttaaaccaactatacaactataacttattttgacaaaaatcagagttgagactcaaacttcctcaaatagttttcctaagactgtttacagaataatctagcctttccttattaagttagaataccacctttaccttatactaaattctcatttgcatgactctggttctaaatttccattgcctttatctgtctggaacagagttagtatacaacattttattgaacatctggttgaacaagtctattctttatttttttatcatttacccttttaaacaaatgttagagtcattttgtcaacttccaaaaataaatctgctgggatttgtactgaaattcattatatatatatatatatatayayacacacacacacacacacacacacgtatatacacatatacacatacatgtataaacacacacatatatatatacatttttttttgagacggggtctcactccgtcacctaggctagagttcagaggcacaatctaggcttactgcaatctccacctcccaagctcaagcaatcctcccacctcagcctcctcagtagttgggactacaagtgtgtgccactacaccctgctaatttttgtattttttgtagagacaggtttcaccatgttgcctaggctggtcttaaactcatgagctcaagcaacctgcctgcttcaacatcccaaagttctggaattacaggcatgagccactacacacccagcagaaattacatttacgaatatgaagacatggcgataagtgacatatttataacatgaaatctgctcatccaggaacacagaatgcaaatctttccttccactcagcaaaattgtcatgttcttgataaaagtcgtgcacatctaagttgattcttaggtatwtaatttttgttgaaatacttaaaaaaatactttatcactataccttcaatgtgattatagctaaaattgtggaaagctattgacttttatgtaacagagctttcaaccagtaatcttaaaaactctttttttcagttggttcctctgaatattttcaggtaaacaatcatgtcagctgaaaataatgatgattatttttctataaagactgtatgacatcatgggaaaatacagtaatttttttttttttttgagatggagtatcactctgttacccaggctggagtataatagcgtgatctcggctcaccacaacctctgtctcccagattcaagcaattctcctgcctcagcctcccaagtagctgggattacaagcatgcgccaccatgcccagttaatttttatatgtttagcagagacagggtttcaccatgttggccaggctgatctcgaactcctggcctcaaktgatccgcccgcctcrgcttcctaaagtgctgagattacaggcgtgagccaccacacctggccagtaaatgttttttaaaatgatgtaaaactatatagaccatgacctcaactatttaaacacatgtataaaggtatatgtattttactagcaaaggaaaaatatatactggtagaaaataaccatcatgtcaacagtggttatattaggtagagaaattatgggagattttaattttttttcctgtctatattttactaattttctcaataatgcttgctcatgagttttataatcaagaaaaaaagcattaaaaactttttcaacatggaaagttatatttctttatatactaaaaacaaaaataaaactttctattcttttactgcagacttacagacccttgaaagaaaaggcaattccctcatactagttctggtgtcattctccccatctctcccttcactcctaccttggtcttttttctgcttcccaccttggctagtggtctctacccaaaatgcttgtttggcttaatggttagaattcagggaaaaagagatccctaatttgtaatctaaattaaggttatacatgtgggaaataaaagagagaccaggtagtaaatagaatttgaaggaaaaaaaamaaacaaactagtctttaattcctacaagattataatcattaatcatgcttttatatcatattatctcttaacatttaatttctatatgtaatgttcatgaggaaaagagaaaatagcttggcttattttcttaccaaattgttgttcttagtatcttctagacgttccagaactgatgtcagatttgggtcttcagaatccacaaaccatatcggtgaagaagatggataggattcctgtttaacacagagacacatgttaaacatttacatacagactaacccaaatatgcaattaaaccacaccactaaacggcaagatgaccatggatttaaacaaaatgtatggggggaaaaggcaacatattaaaaaccttgtgaggagctggacttttgagacaaccattctccttgcatagcactgtctgttgctacagctcatagaagtcaatgattttcttcaacactggtaggcagcctctaaaatggccccgatcaccatcacctcctggcattcacacccttgtaaaattcccgcccctggacctagtgactcacttctaacaaagagaatacagcaaaagtaataacatcacttctgagattaggctacaaagagactatgatgtctgccttgcccatccttctcctgctctttccattgctccctctgatggaaaccagttgccatgtgatgaggtgccctatggagagacctacatggcgaggtattataaaaggcctcagaccaacagccatccagaaacggaggcccagtcccacagcctgtgagatgaatcctgccaacatctacataagtgagcttggagactgattctctccctatcctgccttaggatgatcacagctgccaccaacaacttcgctgcctggtgagaggccaagccagtgaacccaaggtaaattgcacaaaatcctgacccacagaaatggtgagataatgtttgttgctttaagctgataaatttgttacagagcaatagaaaagtaattcaaataccataaaattctaatgttttaatctatcacacaaaccaagtactaccaagaaatgccattactacatatatatacacacatacatacatacatacatatatatatatatataatttttttttctttttttcctcgagacagagtcttgctctgtggcccaggcggagtgcatggcacaatctcggctcactgcaacctccgcctcctaggttcaagcgattctcctgcctcagcctcccgagtagctgggataacaagcacatgccaccacgccaagctaattttttgtatttttattagagacggggtttcaccatgytggccaggctggtcttraactcctgatctcgtgatcagcccacctcagcctcccaaagtgctgggattacaggcgtgagccactaagccaggcccatatcttttttaaaacacaattacatgtgatttctttaaaaagctaatgaactaagcattatgtgctttcacccactaacagacatttactctgttactttgtatgattttctattataaattggggaaaagccattattatcgtatattagcttcagaacaactaggttcaagtcatggaaaacaatttcacagaaacgattttaggaaacactgctttgagaactataatctgatttatagctgaagccacagaaactgaatatttttaaagcattttaccaaatgttcttttaagaataagttgtattgatggaggacatcattaatagtatacctggtcaataatgggttatttactattttcattcctctaactcttactgtgccccaaatctctttacaggctaaatgagaaactctccagaattaatcctgttcttaacaccacttattgagtactgcattttcttcttcaaattcttcagcacacattgggaatacaccatctggaccatttttactgttttagtttttaggtttcttttyccttaggctaaagaaactgcaactacacttaggatctcattattaggttagtatttgtctagtaaacttcagcataagccaagaaacatacatgtcttcactctggactgaaacccctcaaaaccatattaagaaaattacaaaaacaattaactgaaatcatgtttttaatcttgtagatgaaaagatatgatacactgtagatctaagtacctatttcaatggttcccaaagtggggacctcagacccccaggtccaaactatttttacaagaatactaacatgttgacatatgctgtaagggtgcagatacaatggtgggtaaaaacgctggcactttagcacaaataaaggcggtaacaccaaactactagtagtcatggtattcttcactatgcacaggaaaggcttaaaaaggaagggcaacaaaaggtcagtttcatttaagaatgtctacgataaggctgggaatggtggctcatgcctgtaatcccagcactttgggaggccgaggcaggaggatcacttgagcccaggagttcaagaccagcctggccaacagggtgaaaccccatctctacaaaaaaaaataaaaaaattagctaagcatggtggttgcacgcctgtagtcccagctactagggaggctgaggcagaaggattgattgagcccagaaggtcgagtctccactgagctgtgatcacgctactgcactccagcctgggtgacagaacaaggccctgtcycaaaaataaaaagaatgtctatgatgaagcagtgaaaattttactacatctgaatccttgaatatgtctttttaatatttcaagtgatgaaacgggaagtatacatgagcattcctacagactgcctgagaaaaaacccttgtgtgactaagtcatgaagtgaattaaccacttaaatggaataccatttttacttgaaaggataactgacgatgttatttcaacttgggtttttggcagtcattttcctcaaaaaatgagattctgtcatttcaaggaaaacaacagacaggccataataaatttcaataataaaactgctaataataaaatgcaagtttttgaacaaaaaattagaatttttgaaaacttgtatccaccaccgttttccaagaatatcctgataacattgatggcaatattgatgaatgtattttgatactgtaaaatcaaatgtatcaacatttagaagatctcggtgaaccactattttytaaatgaccaatgcatgatgttataatatcatacaagggtaaaagatccaaagttcaagaaagaccaagttttgatagagcatcaaaaaagaagcctaggcaacatggcaaaaccctgtctctacaaaaaaatacaaaaaattagccagtaagatggcctacacctgagtcccaggagactgagggtgcagtgagctgtgatcacaccactgcactccagcctgggcaacacagtgaacccccatctcaaaaaaaaaaaaaagaagaatatccaggattatctaaaatggccattaaaatattcacaatttttccaaccaggtatctgtataaggttggattttgtttacattatttcaagcaaatagcatacaacaaattaaatgcaaaagcaaatgacagagcaaacatcaatgaaatttgcaaaaaatttaagactgtgctactattctattttttggcttagaaaattttgtttcgtaaaagcacatttataataatatgtgatgagtttttaaagagttaatgttttaaatatttctgatttaacttgtagtgataaataccaatagacgtaacttacataaaccaaagcccttaagtgctgaatatattttcaagagtgtaaaggagtcctgaccccaaaactttgagaactgctgccttcccctccactttccttccttccttagaattctttccttggaagaaacatccctttgccattctatattaacttacatagttccattgagaccagttttgctacctccctcccatctttcctcctccctctcttgacacaaaacctgaccaaaggactctaccagcccaccccatttccagtgattagctgtcaggtgggctaagccaagaaaatctgggttttccctgaagctagacctctagttctgggagatctggaatcacagggacaaggatggccaccttggggtggtcagaattcatcttgcctacacgtaaggagtaagttataacacggatctacaatattgttgagtgaaaaagcagattacaaaaaaatctgattttttaagggagagggaacacacataagcatcggagaaaagagatgagcagataactggaaagatacaaaattctgatagtggtatattctgagtggtagaatcatatctcctagttttgactaaatttcttttaatgtcttacaataagaaggttttgttttccatattataaaatatccaccacgccaggaaacttaaccttcagcacaaactctacatcatgttcaaggtttgttcagtttaacatttaagagagaatctactttgaaagacatctaaaataatgaccaatatttaaacctatgtattaatattttcaatctttcacatgctttaagttttgtaattttgataaggttaactaagctttatatctatcttgaaaagataagtttgcctactatttctctttaaaataaatatgacctatggtatatcagtttttaaacagtgaatggtgctcaaaaatcccaatacaaattcaggcagttttcccgtacatagaatgtttaagtgcttctagcaccactctttttcaccacagttatgaaaacacagaacaattatctaagcatctaattactcaggtcctttgttcctcatccattctattagttttatagtaattctaaggcctgtgagaatgaagttgtctgtgaagctaccataaacattactgtaagtggacaaatttcaaacaagttcatcaccactaccatycccaccataaaactgtcttaatggagggaaacacaactcaagattaaccaaaccaacctctttacctgtcactgctcaagaaaaagatttttttgtcttatttagaagtaactttctgtatctatttttctccataaatccactgagaccattgtgtggctctatctcaagcaccagcaaccaaaactggttgaccagaatggtcagtttttgtatctttccaaatgtaggacacagctatcttcagggatttcatcatttttttaaaactgatgcacaaacttctkgaaggttcagagataacagcagttgtaattcttctgaaggccagttatgggacacattactttcatagtttgctgttcaataaatgtggggtggagaacgaagtaaattgacagaattagcatatagtaccttaataaaattctaactgctctgacaacaaaagatacttaaaatgcatacacatggttccctgctaatcattttacaaataaacaaccaagtagctaacctagagcccacaaaagcagagtraaaattctaacacttgttgaaataaaaatgttcatatacccatgataaaaagaaaatgcttaagtattcaaacacaagcagcaaattacagctactgagaacatcattgtaagcaaactgaggcacagaaaaaggtgctgatgaggatctgaaccacctaagctgcagaaacccactgggtggtttcctaggttccaagttgggattatctttcagaatcttctagaagagatcacataacactgttacaaaggatctggaaaaagggacccctgctttatcactctggctctccagtcatgcttgacatttggcagtgactatctccattcaactcaattccccacccctcaactagctgacatttatcaaatactacccttttccaggtctaaatatgtttaaccaaattaaaaaaaaaaaatcaagatactaagggatatactattcacaaaagggaaacctaagtcttctcttcatatatctgttcctttcaaggacaggtataaaaatggggatgagggagcataaataaccaccaggaatttgaccctatattataaattrgtcagataaacgaaaacaatgattcttctggaatgaaagtaccacttaggtgcttaacatgacagttctgatatttccaaatgctcttccatgaattcaatttggaaaggtaatctgtcccaggagggcaaaccaaagagaaaagtcttaggctccttagtccaggtttatttcctttgtacaactttgactggactactttttaatcatagtaaagactagaaaaatgcaagatgaagttaacagcattgctttatttcccacaaaaacctgttataaagcattttcaaaataaagtgttattcagccacaaatgacaccatcgcttttatatttgtagaacataatatcattgccaaagagctttcctmtatatgctctcttgcagtgcaaaaaaatattatctatagtacacagamacacagtaaaagaagtgacttacttaagctcctaactactaaataaaagctaaacttctcacttcctcmtagattcacagctccmacatttttaaaatttagtatcttgctgttgggggtaggcactttttggcaataatgaatagaaatttaattaaccaatcaaaaacaaagtcccactaaaagcagcctagcaaacagccacttatacgcagaaagggtaatcatttatgctctacaagtaatataaaaaatgaagtttcatttgtttactagctaatttacttcctgggggagatttttcattctaaaacagtgatttcctaccaagaatgcccagatgccaaaaagtccataaaaggagtaatggagttgccaagttatgttaaatacttcaaaacgactaaagccatatactagctcccaataaggctgcttaaaacaagctgctttgcatttcggtgtgattgtaacaactaattagacggcaatcaggttagtttactgaagatggaaaaactatacttaagtttgtataacaggcaatctttcatatcatggcttcacagaaaagaataaaaaggactcgaggttgaaaaagagcactcttttcccttcattatttaagatcaggacaaatttataaaacaggaaaagaattagctcaattcccttggcctacagagtaaaacatctactctgttttggtctttttcacttcttacactctcatatgaagtcaatttacagacttccatcaagcccttagagacctttttgtactatccatgacaagttattgatgttatctctgcacttttgacaaattcttagcagttaacttacaaggcagttaagatttttgttcaaatacaatacagctagaatagcgctatatactcaaatrtttatgaagcatttattgagtggaagataaaaagcacaaagcataattataaaatattctcccctgccaccataaaaagaaaaatttaaaggcttacagaatacagcataagaaaacatgaccaaagcaaaaatagtaaggactaaagaagggaggaaggggaaataacagcatgaactaaatatgacccagaagagccttgacggatggtcaggcatataaagacaaatggggtaaggttaaggggtggaggtcaggggcacattctacagggagaaatacagctgatacagaaacctgaaaggaaaagccagcagagcacctgtacaggactcttcaggaactagcatgcacgtgtgtaaaaaacaacttagtttctcaaacattagagaaactgcataaggatgtttcttggtaagtataaagaaaacaagtcctagcatgtagaattcaaatatttgaactgtctaaagaggaaaagttaaagaataagtcaaactcattaccttttccagagttacaactttagagaataacaaatcatcgatcaaaccaaatcatttgaaatccaaccccatttttcccttgatctttcccttctaagcaaatggtatcgacatgaacaagccatgtcattttatcaaaacagtcatccatgtttaaaagagtctttacggccaggaacggtggctcactcctgtaatcccagcactttgggagcttgaggtggagttcaagaccagcctggccaacatggtgaaaccccgtctctactaaaaacacaaaaattagccgggtgtggcggcggaaacctgtaatcccagctactcgggaggcggtggcagcagaattgcttgaacctgggaggcggaggttgcagtgggcccaggtcacaccactgcactccagctgggacgacacagcgagactccgtctcaaaaaataataataaaaaataaaagagtcttttaccttcaaaagatacaagcagaaatatttacagatgaagtgatctgtctggaatctgcttcaaaataatctaaagtggagtacagatgaagattagccaaaagtttatcattgttgaggctggctacattacactgttcaacttttgtacatttgatgattttccataataaaaagttagcagacatttgtactgagcagctgccatgataattatctcctgatagtctgtcatatttcactagcaagtcaattttaatagtttctacctagcggtgggtgccattacactagtcctcactaaatcctccttgtactgaaagtgtctcattcacttcttgctccatttctgttgccactgcctaatccaggtcatcactccttatttttatctgcagcagactcttaccagccttcaatatggttctcgatggggcaccagtggcactttaggtgggataattctttgctgtggcagactgcctgaacgttgcaaaacatttggtatccctgtactcctagcactaaatgccggcacagcaataagaccaccccacccccactgggataaccacatttcctaatgccacccactgtagagaaccatttctaatcctggatgaaagatacattctcccaacttacctgagtaaacttagtagctccccacagcctacaaattcagtctcctatcattcaaaccagccctaccttttcgtggccatgccccaacttctaccagagtaatcaccctcgaagccattcaggcccgtctccttaaaacacctgcttcatgacaactactacactttctgttttccactcttggaaaatcctccccttctccagcctgtatcgtgggcttctcaagtcttagcataaattttctacttctaaggaaaccacactttctcaaatctccgtgtcttctttgggtggagtttcctcagtctaaaatgcccttccgccagccttccaaaattgtagtcacctgtggaagctcatctctaactgtctcagcctctcatcaaagccttccctgaagcgcacctcccccaagtcaaaattagttgctttggctttcctgatgataccacaggagctgtcaccttattgaactcttcccccaagaagactgagttctgagagcgaggacgacttcactcaattctgcaacactagtgcccagaacactcagacgtattcattcaataaatgaattatctcctcagtacagcacttgtctttttttttttgaaattaacacaccttctgcccagatagtctggtaaccattttaaggtcaattataacatcaaggtttttgcaaacgccagccaccctgcaggcacttgagtacccactgactcaaccaaagggagttaaaaacaagacttggttttagccatgtttgaaaaggagcccgaagccaccaccttgacgcctattataaccaasagaatattctgcagtttggaccaatatcctacatcaatttcacgacgaatagcttcacgatacacttttatggagamacttaatacttcaattcctttaccaagccttgggtttctaatgagatttccgcttaatgagtgagtttttaaaagtgtcttttcggctttgtgacatacgtgatctttccggggagcagccctggcgcgtatctcctttcacctatccattttcgaggcttacacacaagggaggggccacacgaatacacactcaacaccacctgccgcaacgacggtactatgctcctttccagaacacagcagcgcgcagccaggcccgggggagaggggtcgctcaaacagcaccagagtctgcattccaacttttcctccgtcaacgagtccattctcattgtcagtttctccttaaacgcaaacttaaaaacaattggctgaacaagcgggaagaaggaaaatccgactgaaaaatgaggcgttaaaacttaagggccgttccccttgccggcctgggctcaaacaacagccggagctgcgccgccccgccccgccccgccccggtcccgggagcaggccggctgagggcggccatggaccccacaagggcttgggccgccgcggactyccccctcggggctaggagacggggaccgagatgggccagaagcccccaagccagcccctggcgagaagccggaaagacgcgccctccgcctcctcccacccaagcctcgcgcagtcccagcccggcctgggatgggcaagtcgcgggggaaaggggcgggcctgccccgcccggggagccggagcctctccggggcaggctcccctttgtcccgggactcgaagcgccccctctccgtcctcgccctgccccgcggggccgcggccgggcrcctcaccgtgatgttgcagtggagcgtgagtggcggcggcagcgagtgcgggctgccctgctgcggcaccaggaactggcagtgcagctcgtccagcttccaactgacgatgcggaatcgctcgtggttcttgtcgaagatggacgccaggaacttcagctcggccttgagccctgacacggacatcttcccctcatctccggcgggaggggcgcggaaggggagccgggcgcggaaggggagccgggcccggagccgccgtcacggccgcgaccgccccgcggggccggcctgggccgcgctctcgcggctccgcctcgtcgagcgctgctggaaaatggcgaggggcgcggaagcctcggcgtgtggcggcctgggtggcgcttcctttgtaaccgactccagcggcaggaggcggcggccccgcggcttaaaagggcaacagcgacgccgcccccgctaccgcctgggaaagggctgcccccaccccgcccccgtccccctcaccctggcgcgccctgcgcgctccggtttcagcgcgtgcacgaggccagagcgcgcgcgcccggccgccccctcctcgccttgacccagctcccttgttcccgacccatctgctccgttcttcgcacccgcggactggaggctcggggccagctggcgcccgggccccagaagtcggggaggagccggagacccccgcgcgcccccgcccccggcctggagccggacacgtgcgtggcggatcgcgccggccacgtcggcgccgctgcagactagcgccagcccctgggggcggctcctcagcttggcgctcggcgcggcacccgctaacctcactggggggacctcgtgggagacgcgggtgcggctcacccagcgttacctccgctactttcaccctagtccgagccaccgcttcgctagcctgggttcctgtgaggaccttctcaccagcctgggttcctgtgaggaccttctcaccggactcgctgctcccgcctttgctctcaaaccatccatttacccaagacgatggtttagcccctggaggctgttgcctggaggtgtcccatgatttcatcccttcccttagctaccacctgtgttcactctgccgtatatagtctctctctcccccctttccttattttgccttgtttcccaagcttaagataaccctccccacccacacccccatggagctagggctgcccactattttcactaaactcatagctcaaatatcatctccggcaccccccaccacaacccatttcaaatagtcaccctgtgtcacatcgtcctgtgctaagtttttgttgggcacctgtcactatctgatctttaacccatttattccttgtctctgccccgtgttaatgtgttcagagctgtatccccaggacctagaacaagacctgttatatagtagaaacccgatatgattgaattgaatgctcgctcttatctggaatccccaccactagcacaattcctggcacattgtaggtgctcaaaaaatgaataaaggtctggatagcagtccaaaggaatacatcccaatttggcagacaatagtgtgtgcaatcgtaagtgcaagaggcaggaccagctgcatatgcgtccaacctatgtagttgcacagtgctcccagcttagaagggcttcgagcttggtttaatattctggtgtcgccattttgaaattcgtaatttttcagaaaggggctccgcattttccttttccagtcttacctagagttacccaaccctgacacctgtctctttcttcctaatctacaagagatccctgggctactggtccccttagatgacaaaatacagaacaacacagggacacattaagtctactgaaagtttttatttccatctacttctgagattttgtatcatgttatagtccttagcctttaagaagacaaataaacttttccaatttacctcagtaagttagtagctccccacagcctacaaattcagtctcttatcattcaaaccagccctaacttttcctggccatgccccaacttctaccatcttctaccccaacttctatctagcctttaagaagactaagattctcacagacccctttgagaatctaataaaagctatgatccatcttcccaggaaaatacttctgcatctaaaattttgtacttatggggattcatgaccccagcactagagctaccacactatacactgggactgggagaagaaggggttccaggcctgggttctgagccagaaacaactaggctactgtattagcattattgctgggttaagcacagaagtggcttgccactttatttttccttcagtccccagtttcttgggaccctaacaggcatggcattcccagataaggatttgagacaaagagcaacaaactcttgagaagttggtatgacttcgagaaacaaaattccctaaacaagctatttaatctgtctaagctttattttgttacctctagattgctgtgagaaaatagagctttttaaattgcaagtgtttttactagttgtatcccagaaatatatacaaatattaatttcacagtcgctttttgagcatccatctgctgcatgccaagctgtaagagggctagaaagatacatagatacagtccctgattttaagaagcttaacatttagcatcaaaaacaaaatattgtttcctgatgcttttggctgcaaataatagaaaactgtgatttaatctgccttggacaataaggaaataaattacttcacataataggaagtccaaagacagaacagtctccaggattggttgacctgagctttcatgtcatcaaaagtccaaattctttccatctcttttgttgggttgagagcaaggtggctgtagctgttcttgcagttcacatccagacatgaaaatatccagaggcagaaaggacattttcttctatgtttccttctaacacatgggaagctttccaagaatcttcccagcagacttcccttagtgtgtccttggccagaagtgtgtcacatgcccacccctaaccaatcacagagaagtagatgggattactctggatttccaacctgctgggatggaatggttgctggggagtcaccatagtcttacacagacaagtaaagacaacatcagatcatatgtgatatgaggttcaaactactgaactacatttcaggggaggaagaaactaattccatgaattatttgcatgaaagtagggccatattcagaggatattcaagagcccatttgattgtagagtacagcaaggggccaagagaaagataaagttgagatattacttttgatcagattttgagccctgaaataccatgccacagactatagtataatagtttcatttggtgagaggcatcacttttttttttttttcgagatggagtctcgctctgtcaccaggctggagtgcagtggcacaatctcagctcactgtagcctctgcctcctgggttcaagtgattctcctgcctcagcttcccgagtagctgggactacaggcatgcaccaccgtgtccagctaatttttgtattttcactagagacagcgtttcactatgttagccaggatggtctcgatctcctgacctcatgatctgcccgctttggcctcccaaaattctgggattacaggcgtgagccaccgcgcctggacaaaagtcatcactttttttttcttttttttttttttgagatggattctcgctctgtcgcccaggctggagtgcagtagcacgatcttggctcactgcaagctctgcctcccgggttcatgccgttctcctgcctcaacctcccaagtagctgggactacaggtgcccgccaccacgcccagctaattttttgtatttttagtagagacagggtttcactggagtaatcacttttaagattaatctgggccaggtacagtggctcatacctgtaatcccagcactctgggaggctgaggcagacggattgcttgagtccaggagttcgagaccagcctggccaacatggcgaaaacccatctgcactaaaaatacaaaaaattaacaaggcatggtggcacgtgcctgtagtccagctactcggggggtgaggtgggagaatcaccggagcccagggggtcgaggctgcagtgagtcaagattgcaccactgcactccaacctgggcaaccagagtgagaccctgtttcaaaacaaaacaaaaacaaaaaaaaaaacaaaaaaagaaagattaatctggcattcatatataaaatggattatagtgggcttagaagtatgcagccaccgaaaagaagcaagagacctggattctacatctggcctgccattaattcaatggggcaagtcatactcagctctgaggctccttagctgcaaacaatgaagagcctttgaatcagtctgagtcaagagtgaaaaaaattgaagtacgggaaatggcagtagaaagaaccacactagggaatcagtgtggagtagaactgctagatcttagaaatgacgggaggatagaaggagagaggggaaatttgtttaaagtaacactttgaaatttctagagcagatggcagggagggagtgatgccattgacacatcaagaaaaagatgttgaatttggtgtgctgatggaacgtaggtagagagtttgtatcttaagtttgaagtttatgagggaagtcagagcaaaggacacataattgggtcagccacacaggtgggtgatggtggaagccatgccataggtgtgatcattgagtcacaagggagggaagacaacctgggatgttgaagggaccctgaggaaggctcaccattggtgcttgagtgggaaaagagtcatttgaagaagtcagaggatgactcatgttgaatttttatggaagggacaagttagttcaggaccaagaaaaggccataggctttagggattagaaggtcagtggtgcttcagagaaaaccattgcaatagcatggtgggcatgaggtcaaagtgatgttaaagtgaagagaatgtacctagtctactttcttgaaaagtttcagggtgttgagaaagagaaatggaataatggtttgcaatagcaaagcaaagggaagcttttgtgtttggttaggtttttattataggacagacagagatggactcactatgaaataagcttcagggcccctcgcagttacacagcccccttctaagtaagtattaacttttcccccttaatttgatatttgtaattttgtatttttttttgaagaagaagaagactcccaagattaaataagctttaggccctgaaaaccctggatctacctctaaggagagaaccattaacaggcaatgaagactggatacgagagaggagaaaaagcatgctactgggtcctggaagggaagagaaaacatgggataaagagttactcatagaaaggaatgccccctccatagaggatagggttgggggagagaattggggaagacacaaagaaatgttgagttagactagagagttgttgagagacctcatactgaatggataacatgaatttcagcaaaacaagattggggattagtacgatagataaaaacagaagccagaggacaaagaagtactaaaaaaaaaaaaatctgcttgaaaactctgatcttggagtctcatctagaagtgcataaaggaccgtgagactaggatgggttgggaggctggaagtctccaggaagacagagcaggttcagtgtgaaaggaaatatgagagctgccacagcctgcacagtggaagaatttcagacttcaagaacttgaatgcatgcagccataaacaaagaacaagatcatgtcttttgcaggaacatggatggagctggaggccattatccttagcaaactaatgcaggaacagaaaaccaaataccgcatgttcccacttataagtgggagctaaatgataagaacacatggacacaaagaagggaacaaaagacactggggtctacttgagagtgaagggtgggaggagaaagaggagccaaaaatataactattaggtactgggtttaatacctgggtgatgaaataatctgtacaataaaccctatgacatgagtttacctatgtaacacaccttcacatgtactcctgaaccttaaataaaagatttttttaaaaaaagaacatgaatgtggaagaatgcccaattatatgttccatgctattctggtctaacatattctttaaggccgtgttcaaatgccatctccttcagtgagccttccctagtcccctatattgaattttagtccctccttttcct

SEQ ID NO: 97096 - DNA, 123047 bp, Homo sapiens
  misc_feature (1)...(123047): n = A,T,C or G
tacctcgtgatccgcctgcctcagcctcccaaagtgctgtgattacaggcatgagccaccgtgcccggcctcataatgttttcaatcttttgatactacaagccattctgcagtcttttaagatttttgtttgtttgttttgcaacagagttttgctctcgttttataggctagagtgccatggtgcgatttcggctcattgcaacctctgcctcccaggttcaagcaattctgcctcagcctcccgagtagctgggattacaggcatgcaacatctcgtctggctaatttcttgtatttttagcagagacggggttttaccatgttgatcagggtggtctcgaactcctgacctcaagtgatccacccacctgggcctcccaaagtgctgggattacaggcgtgagccccggtgcccagcccagcctttaagatttgattgggcaggatgacagtaccatacttgagttcattggttcaagcctgcagttacaggcaagccaggtagttgcctctctactctgggtctcctggatttacctctcaaaacaaactggccagccagccgccttgcactttgttttgttattcacgtttgtgctcagaaatttccaaacattgtcctgttaaaacagtgatggataacagttccggagaactctctttccttacacacccacacgcccacacacacagctgtgcctctgaaaacactgctgagttctctctcagcccactcagttaaatatctttattaattctcctcctcacccagttcctagatcaggagttagaatgcctgggttcaagttttagctcaatactaattatttagttgtgtgactttggataaatcactgacccctggtgtcctgaggatcagtgggcaaaacaaatgtgaagtgtaaatagtgagttgagagactccatcctctcctgtctccaatcaatggtttgtactactcaggtcctgctgtttcttactccagtttagtcctagaaccatttgcttgcctagggagaaaaagcatacttggcccggcacggtggctgacgcccaacactttggaagggggaggcaggcagatcacttgagcccaggagttcaagcctgaggctgggagtgatagctcacaactataatcctagagctttgggaggccaaggtgggtggatcacttgaggtcaggaattcgagaccagcctggccaacatggtgaaaacccgtctctactaaaaaaaacacaaaaattatatgggcatggtagtgcatgcctgtaatcccagctactctgaaggctgaggcaggagaatcacttgaacccgggaggcagaggtggcagtgagcccagatcgtgccattacactccagcctgggtgacacagcgagagaccctgtctcaaaaaaaaaaaaaaaaaaaaaacgggcaagatagtggttacccttcagcagagtagtaactgactgtggggtgggggatgggcaaaaggcgaggctttggcaagttcagaatattctatttgttgatctgtgcattgggcacagacacgagtgtgttcagtttatgaaaattcatctggccgggtgcagtggcttacgcctgtaatcctagcactttgggacgctgaggtgggtggattgctttgagctcaggagtttgagaccagcctgggcaatgtggcaaaaccccatctctacaaaaaatataaaaatgggccaggcctggtggcacgcacctatagtcccagctatttgggaggctgaggctggaggatcgcttgagccaggaagtagaggttgcagtgagccaggattgtgctgttgcactctatcctgggcaacagagtgagaccctgtctcaaaaaataaaataaaaaaattcatcaagcagtacacttatatttgtactttttctgtatattacacttcaataaaaagaaagcaggctggatgcagtagttcacgcctgtaataccagcactttgggaggctgaggtgggcggattgcgtgaggtcaggagttcgagaccagcctggctaacatggtgaaaccctgtctctactaaaaatacaaaaattagcagggtgtgctggtggacgcctgtaatctcacctactcaggaggctgaggcaggagaattgcttgaacccaggaggtggaggtcacagtgagccgagatcacgccattgcactccagcctgggaaacagagcaagacctcccctccaaaaaaaaaaaaaaaaaaaaaaaaaaaaaagtattccagactggttacaatactgaaactaaaggagtgatgaagtcaacctccagtcagctgtattgatgcaaaggagaaaatatcctagctgagataaagattcaaataccaaggatatcgtctctgattcttaccaagggcagcctgaagttcctattgcattaatgcagaaattagttgaggtcagggattgtttttaaaatcctagaaggagccgggcatggtggctcatgcctgtaatgccaacactttggcaggctgaggcgggtggattgcctgaggtcaggagtttgagaccagcctggccaacacagtgaaaccccatctctactaaaaatacgaaaaattagctaggcatggtggcagacacctgtaatcccagctactagggaggctgaggcaggagaattgcttgaacctgggaagtggaggttgcagtgagctgagatcgtgccattgcactccagcctgggcaacaagagcgaaactccatctcaaacaaaaacaaaaatcctagaaggctgggcacggtggctcacacctgtaatcccagcactttgggaggctgaggcaggaagatcgcctgagcccagtgtaactgcccaatgggatcaccttgcctgctgcttacacagcggatatatcaagacaggggaattgcaatggcaaaagagtaattcacacagagccgtctgtgcaggagagtggagttttattattattattattattattattttgattcagcgtctcgctgtttcgccaggctggagtgcagtgatgcgatcttggctcactgcaacctccacctcccgggttcaagcgcttctcctgcctcagactcccgagtagctgggacgacaggtacgcgccaccatgcccagctaatttttgtatttttactagagacggggtttcaccatgttggccaggatggtctcgatctcttaacctcatgatccgcctgcctcagcctcccaaagtgctgggattacaggcgtgagtcaccatgcccggcctggagctttattattactgaaatcagtctccctggagcattaagggatcagagtttttaaagataatttggtgggtaggggcttaggaagtggagagtgctgattggtcaggtttgagattggatcatagggagttgaaatgagtttttcttgctgtcttctgttcctggttgggatggcagacctatttgggccagattaccagtctggatggtatcagctgatgcactgggtgcagggtctgcaaaatatctcaagcactgatcttaggttttacaatagtgatgttatccccaggagcagtttggggaggtttagactcttggagcccatggctgcatgacccctaaattgtaatttctaatcttgtagcttaatctgttagtcctgcaaaggcagactggaccccagggaagaagggggtcttttcgggaaagggctattatcaattttgtttcagagtcaaaccatgaactgaattccttcccaaagttagttcggcctatgcccaggaatgaacaaggacagcttaagggttagaaacaagatagagtcagttaggtctgatttctttcactgtcataaaatcatcagttataattttgcaaaggcagtttaccaggagtttgagaccagcctgggcaacatagtaagacccctatctctaccaaaaaaaaaaaaaaaaaaattagccaggtgcagtggtgtgcacctgtagtcccacctactcaggaggctgaggcgggaggattgcttgagcccaggactttgaagctgcagtgagctgtgatcacgccactgcactccagcctgggcaacaaagtgagaccctgtgttaaaacaacaacaacaacaacaacaactttgggaggccgaggtgggcggatcacgaggtcaggagattgagaccatcctggctaacatggtgaaagcccgtctctactaaaaatacaaaaaaataaaaaaaataaaaataaaaattagccgggcgcggtggcgggtgcctgtagtcccagctacttgggagcctgaggcaggagaatggcgtgaacctgggagggggagcttgcagtgagccgagatcgcgccactgcactccagcctgggtgacagagtgagactccgtctcaaaaaaagaaaaacaaaaaagccaggcgcgcggtggctcacgcctgcctgtaatcccagcactttggaagaccgaggcgggcggatcacaaggtcaggagttcgagaccagcctgaccaacatggtgaaaccccgtctctactaaaaatacaaaaattagccgggcgtggtggctcgcacctgtaatcccagctacccaggaggctgaggcaggagaatcgcttgaccccgggaggtggaggttgcagtgagccgagatcgcgccactgcactccagcctgggcgacacagagactccgtctcaaaaaaaaaaataaaaaaaaaatcataggagcatcacaactcacagcaccttcctgttgtctgaaggcccctcctttgggtccctcaggactggctccagggcttcagccttggaactagttgtggactttgggtccctttggaatatttatctttggcttggaataatgcaacaacgtaccagacccagccttgccttctctatgccccattcctccccaaatgactccaagactgtacccctaatcctgaaccctttgctgcacttgccctagtgaaaatcaaaggtctgcaaaggccgcgtcattcctgaatgatgttcggagtctgatgtcgtttctatgggggattaaaattagcgacactggagatgaattacagggtgcagccagtaaggagggagagagagggaggcaggtgcgattccttccacctaagcatcctggcctggcaggcaacctttccagggtctttcaggctgcaagcgacaaatagttgaggattgtgggtttctcacgcgtaggtggcagcggcaagttaaccccaggagaggtgccagtcagcagataatttgcaaacgaacgtattctcctcctcctccgaggatctgagcctcacgaaatactcttttcttcctttttctccctcccgcagtcgagttgccttccgtccagctagggtcccnnnnnnnnnnnnnnnnnnnnnnnnnnnnnnnnnnnnnnnnnnnnnnnnnnnnnnnnnnnnnnnnnnnnnnnnnnnnnnnnnnnnnnnnnnnnnnnnnnnnnnnnnnnnnnnnnnnnnnnnnnnnnnnnnnnnnnnnnnnnnnnnnnnnnnnnnnnnnnnnnnnnnnnnnnnnnnnnnnnnnnnnnnnnnnnnnnnnnnnnnnnnnnnnnnnnnnnnnnnnnnnnnnnnnnnnnnnnnnnnnnnnnnnnnnnnnnnnnnnnnnnnnnnnnnnnnnnnnnnnnnnnnnnnnnnnnnnnnnnnnnnnnnnnnnnnnnnnnnnnnnnnnnnnnnnnnnnnnnnnnnnnnnnnnnnnnnnnnnnnnnnnnnnnnnnnnnnnnnnnnnnnnnnnnnnnnnnnnnnnnnnnnnnnnnnnnnnnnnnnnnnnnnnnnnnnnnnnnnnnnnnnnnnnnnnnnnnnnnnnnnnnnnnnnnnnnnnnnnnnnnnnnnnnnnnnnnnnnnnnnnnnnnnnnnnnnnnnnnnnnnnnnnnnnnnnnnnnnnnnnnnnnnnnnnnnnnnnnnnnnnnnnnnnnnnnnnnnnnnnnnnnnnnnnnnnnnnnnnnnnnnaataatataaaaaaggatttcctcccggaagagagcggcagttcggagagatttttcttaaggaagcagaagcggcgtttgcggccgctgcaggcgccgggccctgccggccacactatgcgcgagccggccccgggctgctgaggcgcggggacgcggaagcggaggccgagcgcgccgggctcccgcgctcgcgagcgagttttgtccgcccggcggcggtggcggggggatggagcccgcgaccgcgccccggcccgacatggcgccggagctgaccccggaggaggagcaggtaagcgggcccgaggccgccgcgttgggtgtgtccgggcccccgaggcctacgccggcctctgcctcccgagtgccggctctttgcagccacggggccgcagccccccgctcccgtgcccggctcgcgggcctccctcaccggcgaccgcgccccaggccgccaccccctcgtcgggggacccacgggaccctactcccgttcccgccgcttctttcgccgaggcttaccagcctcagacggtgccctccgcaccccaccccctattccaggggcaaagttccttggatccaggggccttcttcccgagatttgcagaaccgctgcttgcccccggcccttccactcccttgtaaatgttttccgtgagggtttgtggcttttgaagggcaggaaaagccccagtttggggggtgcttcctgtggggattatctcccttcccgaggagagggctgagagtattggatgcatagatgccctagattttcagaggagcctcttaggtttctcaggcccacttgggcaggttatggaagatccagcccttctcgtgttcctaaagtccctggccttgacccccctattcagctatcccagacggggcgcatctcctcacccgcgcttccctaccctcgtctcatctgactgtctccatctttctgaagcttacattgagctctattgttccttaaaagcctatgacctttagttttcagaaggaagtggtttgctgtctcattttgggggcccttgtaactttccctcccgcacattccagctgcggagacagggaccactcctgaggaagatgggaaggtctgctagcttagactgggaaccctacgggcttttcgctgtctcttccttggcactgcccataccccgccatagctatgctcgattatagtcatagtctgattccatgttataaataaaaaaaataaaaataaacatgaaaaaagaaaaaggcaaaccatgctggcaacccatttcaagctctacagctcttgtttccaaggaccacatttgctagcacagcctctagtgtgaagacagtccagttttacaaactattattggctaatgggcttgttgacctgattttttaaagtccttgtcttttctccttatttgtggagatgacatttttctatttggcctcaggccacggttttgtcttttgacacctggtgatgaaatctgtatgggaaaaaaatttaaaaagaattctgctttgtacaagcagtggtaatgaatgtcctggtaactgcagttggatgttaataaaatgctagtcagaccctagtgcaagcaggtggccaaggagcccattctgccagaattgggaagtacttcagtactaagataggatgtgttggctgattttaaagggacaaaatctctttctttcatccttttccttgggtcagtcagatttctgtttttaagacttaaagccatcagtattctatgcaaatagcatccgttgcaaatttgaaaactaaaaccaggaaaagtaaatattaaagtattgatagtattgacatggtattggctttactttgtacatagtgcatacacatatatacagatgtgtttaactagtaaaaaccttatcttttaccctgaattgaatgtgatgggcattaacaaggactaggatggaaacggcaaaatgtttattaaagtcaagagattgtgtgtgtgtgtgtttttaaaatcttatctcttttttctacaaaatattatttttttacaagcatttcaaaatattgaaacaaaagcagtatagttctaattatggtaatgcctaatgttaccatattttagtttaatatcacataagagtactctctttttttttgagatggagttttgattttttgtttgtttgtttgtttttttgagacagagcctcgccctgtcatctaggctggagtgcagtggcctgatcttggctcactgcaacctctgcctccagggttcaaacgattctcctgcctcagcctcccgagcagctgggattacaggcgcctgccaccatgcccagctaatttttgtatttttagtagacgcggggtttcaccatgttggccaggctggtcttgaactcctgacctcatgatctgcccgcctcgtcctccaaaagtgctgggattacagtcgtgagttactgcgcctggccggagtttgggttttgttgcccagactggagtacaatggcgtgatctcggctcactgcaacctccatctgccgggttcaagcgattctcctgcctcagcctcctgagtatctgggattacaggtacccaccatgcccagctaatttttgtatttttagtagagatggggtttcaccgtgttggccaggctagtctcatcatactcctggcctcaggtgatccacccgccttggcctcccaaagtgttgggatcacaggtgtgagccactgcacacagccagaagtacccttttgttttttaactgagtcttgctctgttgccaggctgaagtgtagcgttgtgatctcggctcactgcaaactctgcctccctgattcaagcgattctcctgcctcagcctcccaagtagctgtgacttcaggcgtgcgtgccaccatgcccagctaagttttgtatttttactagagacggggtttcaccatgttggaggatggtctcgatttcttgacctcgtgatccacccgccttggcctcccaaaatgctgggattacaggcctgggccgctgtgcccagccaagagtactctttttttttttttttttttttttgagatggagtcttgctctgttgcccaggctggagtgcagtggcgcaatctcggctcactgcaagctccacctcctgggttcatgccattcttctgtctcagcctcccgagtagctgggactacaggcgcccgccaccacgcctggctaatttttcatatttttagtagagacggggtttccccatgttagccaggatggtctcgatctcctgacctcatgatccacccgccttggcctcccaaagtgctgggattacaggcgtgaaccaccgcgcccagccaagggtactcttaagatttatttaaaatattaaaattaaacagcagtacataagtgttagccttatcaaagtggtcctcatgggaactgacacattcactccgtaatgctgccctattgctcaaaccaatttaacatttatttggagttgatttagaagcttgtggcagaatctttgaaatttcttcagtgtaggaaaatccttgtacttttgagagtcagtttgatttctgtaaatagcaaaaaatcttttagagccttatttaaagtaggggatcaaattcggtttacacattttcatgcaaaagtgtagtgcagttaggccctttttggcctgtgtgaacagccttaaagatatttcttttctttctttctttttttttttttttttttgagacagagttttgctcttgttgcccaggctggaatgcaatggcgtgatcttggctcattgcaacctctgcctcccgggttcgagcaattctcttgcttcagccaccctaktagctgggattacaggcgcccgccaccacacccagctaagtttttgtatttttagtagagatggggtttcactacattrgctaggctggtctcgaactcctgacctcaggcaattcacccacctcagcctcccaaagtgctgggattacaggcgtgagccaccgcgcctggctccttaaaaatatttctgaagcagaatacctcctgagtggtatctccttctgtacagtcatatgaatcagaaacccagaagtcttggacactgctgtccctctgcccttgtgtacaatacagtgttagattttcctgaatatctcttgaattcattggcttccttccaccatcactgccatcaccctattcgaagctactatcctatcctgacaggacttttgtttcccacctggtccatccatattccagaatccagaagccagagtcctgttgaaaatctgatttcatcttcccctcagcctgcctgccccgcaaagaagcattcataaaactctttagtggcttctggttgccttttttttttttttttgtggagacaggatctcactttgtcacccaggctggagtccagtggtgtaatcacggctcattacagcctcaacctcctgggttcaagccgtcctcctgcctcagcctcccaaagccttaggattacaggccttgtcattgctcttgagatcaaattgcaacttttgaatgtaggctatatatctaggcccttgagcagcctaggccctagctagttctcacacttgtctctgctccatgcacactggccttatagtcctgccttctttccttgtttcctcctgcttacagggtctttgcaggagctgctttcctccatctggaaacacccccctttgttaacctcctcttcatccttcagctctcaggtttcacctccttggaaggccttccttgatttcagttagattagattctaacctaataggttctcagagcaccatttacctgtcattcacatcacttatcacaagttaacasttatttgtgtgattacatgactgcaagcaagctctatgagggttgggattattttcgcttttgctccccatcatatgcacattgcctagcataatgactgacataatgactggcacttacggaaatacttgcagaatgaatgaagagtagttgtactcttgatttgtatacaggcagcatcatcttctttcagagtggcttaaaaataagcacattacatattttgatttttttccccatcaaatggcaatatatactttgatttatatgctgtgtatgcattgatatagtttttgaaagtcatgattacttagtctcattttctgtctaggcatgtgttgaacggatacaaatcctcatttgtaactttggtgtttcttgtttttcagctcctcaataattataaagcctacaattgggctacgaggacaaatatgatgtttttgcttttaaggagcttatatgaataacaatcgtaacagtatcttttctaaactcctgctttcagtcaggctctgtggtgggcatttcacatgcaattaatcgtccctcccaagattggaattactaccctcactttgcaaataagaaaactcagactgagagaaggaaattgcccaaggtcacatagttaacaagtgatgtagccatgatttccacccaggtctaggttttctgccttcactgccagtgtttcctcttttacactacattacttcccatgaagccattagccaatttacttaggtgcctaagtgggtataaaatagctaattttgtgggttttggtattgatatatgtgtttggttttgttaatgcttcttaaaatatagtttgaaaagtacagatgaaaagatacagaaaacctttactcagctgtgtattgccagaggaaacatactgtatactctgtgcaagaaattatgatgaaattactataggaaaaaaatttgttccttaaaacagagttgtcaactctccatttcaaggtgtggtcacaactacaataaaattttattttctttatatcttcttgttcttttgcacaagaaggcttgtgaaagcctttctttttctttctttctttttttctttttttttgagacagagtctcgctctgtcgcccaggctggagcgcagtctcagcccactgcaacctccgccttctgggttcaagcgattctcctgtctcagcctctcgagtagctgggactacaggcatgcaccatcacacccgactaatttttgtattttctttttagtagagatggggtttcaccatgttggctagtctggtctccaactcctgatctcaagtgatcagcctgccttggcctccccaagtgctcggattacaggcatgagccaccatgcctggccgtaaaagcctttcttaatgggctggcagtttggcagtgtgaaggacaatttctacatataagtattaatcttcattgtcattatgttattgtgttttgagacggagtcttgctttgttgcccaggctgtgggcagtggcacgatctcagctcactgcaacctttgcctcctgggttcaagcgattctcatgccttggcctcccgagtagctgggattacaggcacctgccaccacgcctggcttatttttgtatttttagtagagatgggatttcaccatgttgcccatgctggtcttgaactcttgaccttaggtaatccacgtgcctcagcagcccaaagtgctgggattacaggtgtgagccatctcaccctgccaagactcttaactagaactctcactagattaaaattctgtataattatagctgttyagggtattttggttttgcatggatatcccagtgatgattgataggataatagagtagttttcgaaagtacttatgtttctgttaatagttttatttttattttttatttagttttttgagacggagtcttgctctgtcaccaggctggagcacaatggcacaacctccacctcctgtgttcaagcgattctcctacctcagcctcccaagcagctgggactgctggcatgcaccaccatgcctggccaatttttatattttagtagagatggggtttcaccatgttggccatgatggtctctatatcctgacctcgtgatccacctgcctctgcctcccaaagtgctgrgattacaagcgtgagccaccaccaatttattttatttcattttttaaataatagagataaggtgtcactaygttgcccaggctggtcttgaactccagggctcaagcagtctacccaccttggcctcccaaaatgctgggagtacaggcgtgagccaccacgcccagcctgaaaattattattatttttgtttctttttttattttaattttatgttttttctttttttgaaaattcttaaagtttatgttatttagaccttacaatgttgtgaggattaataaggagatgcatgtagagcacttagcccaatgcttatataataagtagtcagaaaagttagccattattatgatattcatcattgttttttgtttttttctttttgagacagtcttgttctgtcacctagactagagtgcagtggcatgatctcggctcactgcaaccgccgcctcccgggttcaagcaattctcctgcctcagcctccctagtagctgggattacaggtgcccgccaccatacctggctaatttttgtatttttagtagagacggggtttcgccatgttggccaggctggtctcaaactcctgacctcaggtgatcaacctgccttggtctcccagagtgctgggattacaggcatgagctaccgtgcccgtcctcatcgtttttgaatagcgaaaaattttagaaccatgttagcttaagccaattacaaggggaaaaaatattcatatccaccctggggaccatcacctagtacaggttcttatgaattccagaaaattattatcttgcatttttatagtgtagtttttaaaagcctattctaattgtatggtgtggtttttgcttttttttttggagacaggatcttactctgtcacccaggctggaatgcagtggcatgatcataactcattgcagcctcgacctcccagcctcccaggatcaagtgatccttccacctcgcctcccgggttcctgggactacaggcatgctaccacacatgactaatttgttatattttttgtagaggggggttttaccatgttgcccaggctggtcacgaactcctaagctcargcaatcctcctgcctcggcctcccaaagtgttgggattacaggcatgagccactgtgcccagtctggtttggatttttgtaatggaatcttttaaagctaaaaatttaactgctttagcgtggacttcagagatctttggcatttttcccaaaggcaagggttttgtcccatttcttgcggccaagaacttcccttttcccacagtcttacatgtcctgtgctaaatgtcatctgtctccctggaagttaccatacgtcaaggaccaaatgatttatgatgttaaattgaggtcttctacagagacaaagaaggaaggaaaggtgaagaactcttattattttcattattgctgatagtttatgatactgtaagtaacaattaggtaaaacctcatttggatgtgagaattttgctgtattaaaaatttctggttgggtgtggtgtggctcatgcctgtaatcccagcactttgggaggccgaggcgggtggatcacaaggtcaagagatcaagaccatcctggccaacatgatgaaatcccgtctctagtaaagatacaaaaattagctgggagtggtggcgctcacctgtagtcccagctactcgggaggctgaggcaggagaattgcttgaaccgggaggcaggggttgctgtgagctgagatcgcgccactgccctccagcctggtgacaaagcgagaatccatctcaaaaaaaaaattctgagcacaagggtcttggactttagttttgtgaatattaagtggcctggaggttttctctaaggaacccaacctagtacttatgaatgaattgaaaagaccctcctttagaaaggagctgaactgtttttttttttttttttttgagatggagtttcactcttgtcactatctccgctcactgcaacctccgcctcctgggttcaagcgattttccagcctcagcctcccaagtagctgggattacaggtgcccgccaccacgcccagctaatttttgtattttttgtagagatggggtttcagcttattggccaggctgctcttgaactcctgacctcaggtgatcagcccgcctcggcctctcaaagtgctgggattacaggcgtgagccaccatgcctggccaggagctaaactgttttaaagaggtaaaagttaagactcattgtgagtatattttagtttcattttctgacttttatgcctttattgtcttggaaaagacatagtaattttggagtacttaaactttattttctaaatattaagccccattttacggcagtgtggctggtccattgcagtgccaagattagaagtcatagaacctaaccctgattatttgttcagatacaacctctagtgtaatatcagccatttcactgcttctgtctaccatcctgccttggtatatcagacaattctcgtactttctttttcctaatcaattattttaacattttccccctaagcacacctccatgcgagatcttggttgctcttcctgaccactaaaataaccactgttttctattcctattcttctagaataagggaagatgttcctagaaaaggtagtttagcctacacttctcagtgctggagggcctggcatcagcccttttatatctgattttgaaaaggccccttaggaacctaaccgagttagcttcttaagcgtttggttcactttttaaaatttttttagtaagagacagggtcttgttctgttgcccaggctgaagtgcagtggcttgatcctagctcgctgcagcctgaaactcctggtcccaagtggtcctccttcctcagmctctatagtggctggaactacaagcatgtaccaccatgcctggcacatttttttttttttctaaagagatgggggtattgctttcttgcctaggctggtcccgaactcttgtgttcaagcagtcttccagcctcggcctcccaaagtgctaggattacagacatgagccactgtgtccatccagcattaggttgttttttttttgttttgttttkttttttttttttgagacaaggtctcactctgtcacccagactggagtgcagtggcatgatcatggcttgctgaagccttgacctccctggcccaaggaatcctcctacctcagcctcccaagaagctgggactaaaagcgtgcaccaccacaccaccatgcccagttagattttttattttttatttgttgtagagacagggtctcgttctgttgcccaggctggtcttaaactcctaggctcaagtgatcctccagcctcggcctcccaaagtgctgggattacagccatgagccactgcacctggctggcattaggttgttaaacatggacatggagggtgcgaacaggaggcagagaagctccagaactcatgggaaaccttatttattaaggattgctgatctcttaggtccaaactataaaatggtaagaccgaaacagtagattagagatgatttttctctttaatttatgcttctgagataagcatttcagtttttgttttctttttttttttttttgagacggagtctcgctgtgtcgcccaggctggagtgcagtggcacaatctcggctcactgcaagctccacctcccgggttaatgccattctcttgcctcagtctcctgagtagctgggactacaggcgcctgccaccacgcccggctaattttttgtatttttaatagagacagggtttcaccgtgttagtcaggacggtattgatctcctgaccttgtgatccacccacctcggcctcccaaagtgctgggattacaggcgtgagccaccgcgcctggcagcatttcatttttcctttgggaaaggccgtttctgtagtatgtaccagtttcctctgaaataccaaatccatccacaacataccggcacagtacttgtcacttttttcagtgtaggtagcacaggtaagtttattgaattattctgaagccagaatttatttctacagtaatttctgggcaggttctaaaaaagtcatctgtgactttaggactgaagtgtttggggatgttcatccattagttacttgttcattgcttgaacacctagctaatctttacctttgcatttgttttgatgtgaatcattattacagatacacgtcattatgataatatgatgatattcattatatacatcattattacaaccaatccttttaaaaaatgggctatttaaggctgggcgcggtnnnnnnnnnnnnnnnnnnnnnnnnnnnnnnnnnnnnnnnnnnnnnnnnnnnnnnnnnnnnnnnnnnnnnnnnnnnnnnnnnnnnnnnnnnnnnnnnnnnnnnnnnnnnnnnnnnnnnnnnnnnnnnnnnnnnnnnnnnnnnnnnnnnnnnnnnnnnnnnnnnnnnnnnnnnnnnnnnnnnnnnnnnnnnnnnnnnnnnnnnnnnnnnnnnnnnnnnnnnnnnnnnnnnnnnnnnnnnnnnnnnnnnnnnnnnnnnnnnnnnnntgatccaagatcacgccattgcactccagcctgggcgacaggagtgagattgcatctgaaaaaaaaaaaaaaagaaaaaaaatgggctatttagatgatctacaatgatcatatgtttctgttgccgaggctggaatgtggtggcacagttatggctgactgcagccttgacctcccaggctcaagcgatgctcccacttcagcctcctgagtagctgggaccacaggcccgtgtcatcacatccagctaatttttttttctcattaatagagataggacctcactatgttgcccaggctggtctgaaattcctgagctcaagctatccttccgcttcagcctcccaaaatgctaagattataggcatgaaccactgtgcccagcccatatgtttctttctttttttttttttgagacagagtgagactctgtcgcccaggctggagtgcagtggtgcgatctcagctcactgcaacctccgcctcctggcttcaagcaattctgtctcagcctcccaagtagctgggactacaggtgcctgccaccatgcccagctaatttttaaatttttagtagagatggggttttgccattttggccaagctggtctcaaactcctgacctcaggtcatctgcccacctcggcctcccaaagtgctaggattacaggcatgagccactgtgtcccgccacttacgtttcttttataatgaaaaataacactttctgaaaagtactatgtgttctttacacgtttaagattatgctattaaatgctgagatctcagtttttaatattattgcaaatctggcctttttataaactagaagatttataagtaaaacctaggccttttgggatgtgatggtgatgaccctttggtagatctcaggaatccctcagcttcctttgtggctctcggtgttttatttaacgttcctgaatctgttttgtcttatttccttaagttttttggagatctgcttaattaagtaaaatcccttgtatttacaaaatgctcaataaatagtggtaagtattcttgatctctgtgatacaggaaacttttctttttcagataagaataggaagaaaaatgaagagtctgactttgtagcattgaaataaaagatttcaagatagcctaagaattctaacagttaccatgcatgagtaatatacatagcagagtactgaggctaccttagctcattttttactgttaagactttttgcatcatccattggttcattggttcatttcttctttctaggttacacattacctttaggtgcactggtggtggtggtctgcttctgctgctgcttttcagataaaatattaaaaggtcatctgatgacctaaaaatgattcgcaaatgagtgcaaagaatgatagtttgtattatcttccatatcttatttaaacagcctttatgaagaaaattatcattccattgtttatctctggttccctatcagtatgatcctccccccagaacatttgtcaatatctagaaatttctttagttgtcatgactgtgggaggtggtactggcatctagtggatagaggtcaggaatgctgctaaacatcctctaatgcataggacagctccctacagcagagaattatctggtcaaaatgtcagtagtgccagagttgagaaaccatggtttatctctgaaaaattttgtagttaggaacagtttgaagttttcactttaaagttaaagataggtctttgctcaacacatttagtgtttatgaaaatatgtgtcaccaaatactgatttcagcaattgacttctcatactgaaaagctctagtctaaaaccaattgttttatagcataaccatcataggggtaaaatgagccatttccacaccctttgcaggggttttcagaggtggagggattttatttagcttttaaaaaattattattattattattattattattattattattattatatattttttgagacggagtctttttctgtcgcccaggctggagtgcagtggtagaatctcggctcactgcaacctctgcctcccgggttcaagcagttctcctgccttagtctcctgagtagctgggattacaggcacgtgccaccacgccagctaatttttgtatttttagtagagacggggtttcaccatgttggtcaggctggtctcgaactcctgacctcgtgatctgcccgcctcaggctcccaaagtgccgggattacagtcgtgagccaccgtgcccagccaaaatttatttttatgtatttatttttaatagagagagggtcttgttgtgttgcccaggctgttctcaaattccttgcctcaagggatcctcctaccttgccctcccaaagtgttagaatacaggcatgagccactgcactccagatggagggattttacatgagagaacactactgagctttgccatggcatgataatgtggtgtcatatttttttttttttttttgagacgtagtctcactctgtcggccaggctggagtcagtggcgcgattctggctcactgcaagctccgcctcccgggttcacgccattctcctgcctcagcctcccgagtagctgggactacaggcgcccgctaccacgcctggctaattttttttgtatttttagtagagacggggtttcactgtgttagccaggatggtctcaatcttctgacctcctgatctacccgcctcagcctccagaagtgctgggattacaggcgtgagccaccgcacctggccaatgtggtgtcatttttatttttccccttcaagtgtttctcttttttaaaattattgtttttggccaggcatggtagcttaagcctgtaattccaacactttgggaggctgaggcaggaggatcgattgagcccaggaatttaaggttacaaagtttacaaagctatgattttgctgctgcactccagcctgggtgacaaagtgagaccttatctctattaaaaaaaaaaaaagacataatgtacataataattatacatattgtgatgtttcagtacatgtatacctccaaatgtttctgagtgttgccctgaagtgtctctgttcccctgataatcaccacacagtgttattttttatcaattctttatcgtgttaatgtcaactgaggattttttttagatcataagcagaaatatagtttgttcattcaaactatatttgaattatctgttggtatgtgccaggtccttgtatagcaaggttggagctctctatccttgaggaattgctttctagttctttgaaggcagttattaaactatagagtacctgtcaaggaggaggacttgttacgtgcaatgaggacagggactcgaacttctgnnnnnnnnnnnnnnnnnnnnnnnnnnnnnnnnnnnnnnnnnnnnnnnnnnnnnnnnnnnnnnnnnnnnnnnnnnnnnnnnnnnnnnnnnnnnnnnnnnnnnnnnnnnnnnnnnnnnnnnnnnnnnnnnnnnnnnnnnnnnnnnnnnnnnnnnnnnnnnnnnnnnnnnnnnnnnnnnnnnnnnnnnnnnnnnnnnnnnnnnnnnnnnnnnnnnnnnnnnnnnnnnnnnnnnnnnnnnnnnnnnnnnnnnnnnnnnnnnnnnnnnnnnnnnnnnnnnnnnnnnnnnnnnnnnnnnnnnnnnnnnnnnnnnnnnnnnnnnnnnnnnnnnnnnnnnnnnnnnnnnnnnnnnnnnnnnnnnnnnnnnnnnnnnnnnnnnnnnnnnnnnnnnnnnnnnnnnnnnnnnnnnnnnnnnnnnnnnnnnnnnnnnnnnnnnnnnnnnnnnnnnnnnnnnnnnnnnnnnnnnnnnnnnnnnnnnnnnnnnnnnnnnnnnnnnnnnnnnnnnnnnnnnnnnnnnnnnnnnnnnnnnnnnnnnnnnnnnnnnnnnnnnnnnnnnnnnnnnnnnnnnnnnnnnnnnnnnnnnnnnnnnnnnnnnnnnnnnnnnnnnnnnnnnnnnnnnnnnnnnnnnnnnnnnnnnnnnnnnnnnnnnnnnnnnnnnnnnnnnnnnnnnnnnnnnnnnnnnnnnnnnnnnnnnnnnnnnnnnnnnnnnnnnnnnnnnnnnnnnnnnnnnnnnnnnnnnnnnnnnnnnnnnnnnnnnnnnnnnnnnnnnnnnnnnnnnnnnnnnnnnnnnnnnnnnnnnnnnnnnnnnnnnnnnnnnnnnnnnnnnnnnnnnnnnnnnnnnnnnnnnnnnnnnnnnnnnnnnnnnnngcctaggatgattgtctttaagatatagggatgatattcagaggctttcagtagaagcgctgagactcactcttctggttaactgctgtctccagtgcacttcctctgcctttaaccatgtatgttcgtgtatgacacacacaccccagagatagctctccctggacatttgtgggttcaacattcctggtttcagccactcacaagtttccctgtagaggtgtggctacattgttcccagttatttattgttccaagatgtcactgtttaatgtacatttacgtatgacagaaattatatgatttaatgaggttaatgaagttggggagttcatataagcctctggctgtagctctcagaatagaaggtctgctctttgcctttatgaaaatccatcttggccaggcgcagtgggtcatgcctgtaatcccagtactgtgggaagccaaggcgagaggatcatctgaggccaggagtttgagaccaacctgggcaacacagcaagaccccatgtctacacaagtaataataataataataaattagctgggtgcggtggctcacacctgtaatgccagcactttgggctgctgaggtgggtggattacctgaggttgggagttcgagaccagcctgaccaacatggagaaaccccatctcactaaacatacaaaattagcctggcatggtggcacatgcctgtaatcccagctacttgggaggctgaggcaggagaatctcttgaatccaggaggcagagattgtggtgagccgagatcgtgtcattgcactccagcctggacaacaaaagcgaaactctttctcaaataaaagtaataaaaaataaaataaaaaataaattagccgggcatggtggcacatatctgttgttggctgatgtgggaagatcacttgagcccaggagtttaaggttgcaatgaaccatggtcatgccactgcactccagctggagccacagtcttatatatatacagtttaatctctcaagtaccacagtgagtataatgggaaagtatatttcatatacttgcctatcaatatctgggacaacagcttttgaaattgtttttccatgatactttcgttttgcccatttttttttttccttttctgtttttaagctagattttttttcaacttgggtcaaatgtaagaaagttgaggaagaaaattttccaaaaaacggaattcttttttaagtaattttttttttttgagatggagttttgttcttgttgcccaggctggagcacagtggtgtgatctcagcttactgcaacctccatcgcctgggtttaagcgattctcctgcctcagcctcccaagtagctgggattacaggcatgcgccaccgtgccgggctaattttgtatttttaatatagataaggtttcaccatgttggtcaggctggtcttgaactcctgacctcaagtgatccacttgcctcggcctccaaagtgctgagattacaggcatgggccgccatgcctggctttttaaagtaattttttttttttactctcactctgtcacccaggctggagtgcagtggtgtgatctcagctcactgcaacctcagactcctgagttcaagcgattctcctgtctcagcctcctgagtagctgggattacaggcacgagccaccatgcctggctactttttgtatttttagtagagacggcgtttcaccatgttggtcaggctggtcttgaactcctgaccttgtgatccacctgccttggcctcccaaagtgctgggattacaggtgtgagccaccgcgcctggctttaaagtaattaacaacaacagcaacaaaatatagatgggtgtctcactgtgttgcccaggctggtctcgtgctcctgggctcaagcaatcctcctcttttggcctcccagagtgctaggattacaggtgtgagcctctgcacccagccaggaagttatttttactgctcttttatactttctatattttcctgatttttttcttggaatcatgaaggaaaagagttactgagagaaaggcctgaagacttaaatgtaatatatgaggacaattaaacagttttatttgggaatgrccatttgcctcactaaggaggctctagctcttccatgccttgaaaaccccaaaaatgaagaaaaaatggtatttctggctaggttagggacttagaagtggtgtagccagcaagattaaaatatacaagattttccacatacttttgttttcaaaaataacctttctagattaatttctaaatgctctagagaaaccattagacatttccggaaactgaatgccagtgtgtgccattttgtttatgggtaaaacaacgttattatggaattaagttatcagataaattttttttttttttttgagatggagtcttgctctgttgcccaggctggagtgcagtggcactatctcagctcactgcaacctccgcctcccagattcaagcaattctcctgcctcagcctcctgagtagctgggattacaggcacatgccaccatgcccagctaatttctgtatttttagtagagatggggtttcaccatgttggccaggctggtcttgaactcctgacctcaaatgatctgcccaccttggcctcccaaagtgccgggattacaagcatgagccatcgtgcccagtgagaaagtttttaaaaagaaaaaaatattcatttttttcttttcttcagccaccccaaatattttctttcttctttttttttttttttttgttgaccattcttgggtgtttctcgcagagggggatttggcagggtcataggacaatagtggagggaaggtcagcagataaacaagtgaacaaaggtctctggttttcctaggcagaggaccctgcggccttccgcagtgtttgtgtccctgggtacttgagattagggagtggttgatgactcttaacaagcatgctgccctcaagcatctgttcaacaaagcacatcttgcaccgcccttaatccatctaacgctgagtggacacagcacatgtttcagagagcatcgggctgggggcaaggtcacagatcaacagcatcccaaggcagaagaattcctcccagcacagaacaaaatggagtctcccatgtctacttctttctacacagacacagcaacagtctgatttctctatcttttccccacatttcccccttttctactcgacaaaaccgccatcgtcrtcatggcccgttctcaatgagctgttgggtacacctcccagacggggtggtggccgggcagaggggatcctcacttctyagacggggcggctgccgggcggaggggctcctcacttagacggggcggccgggcagaggcgctcctcacatcccagacggggcggcggggcagaggcgctccccacatctcagacgatgggcggctgggcagagacgctcctcacttcctagacgggatggcggccgggaagaggtgctcctcacttcccagacctggcagccgggcagaggggatcctcacatcccagacgatgggtggccaggcagagacgctcctcacttcccagacgaggtggcagccgggcagaggctgcaatctcggcannnnnnnnnnnnnnnnnnnnnnnnnnnnnnnnnnnnnnnnnnnnnnnnnnnnnnnnnnnnnnnnnnnnnnnnnnnnnnnnnnnnnnnnnnnnnnnnnnnnnnnnnnnnnnnnnnnnnnnnnnnnnnnnnnnnnnnnnnnnnnnnnnnnnnnnnnnnnnnnnnnnnnnnnnnnnnnnnnnnnnnnnnnnnnnnnnnnnnnnnnnnnnnnnnnnnnnnnnnnnnnnnnnnnnnnnnnnnnnnnnnnnnnnnnnnnnnnnnnnnnnnnnnnnnnnnnnnnnnnnnnnnnnnnnnnnnnnnnnnnnnnnnnnnnnnnnnnnnnnnnnnnnnnnnnnnnnnnnnnnnnnnnnnnnnnnnnnnnnnnnnnnnnnnnnnnnnnnnnnnnnnnnnnnnnnnnnnnnnnnnnnnnnnnnnnnnnnnnnnnnnnnnnnnnnnnnnnnnnnnnnnnnnnnnnnnnnnnnnnnnnnnnnnnnnnnnnnnnnnnnnnnnnnnnnnnnnnnnnnnnnnnnnnnnnnnnnnnnntgcagtcttggctcactgcaacctccgcctcccaggttcaagcagttctcgtgcctcagccttccgagtagctgggattacaggcgtgtgccaccacgcccagctaatttttgtatttctattttttcttttttttttgagatggagtctcactctgttgccaggctggagtgcagtggcgcaatctcggctcactgcagcctccgcctcctgggttcaagcagttctcctgcctcaggctcctgagtagctggcactacaggtgcaagcaaccacgcccagctaatttttgtatttttagtagagacagtgttttaccatgttggccaggatggtcttgatttctcgacctcgtgatccgcctgccttggcctgccaaagtgctgggattacaggtgtgagcgactgcgccyggtcaatttttgtatttttagtacagatgaggttttggcatgttggccaggctggtcttgaactcctgacctctggtgatccacccaccttggcctcccaaagtgctaggattacaggtgtgtgccaccgcgcccagcccattttctttcttagtcaacctgaagctaggtaaatgctagccttggaggtgatttttcaagaaaattagaagcaatcgtgaaaacttgtcttttgaatggaactgctaaaccatttgaagctggaaaatagtcagaacctctcatgttgtcatgctatctttacagtgctacaagtattggtaaaagcccatatcaaaacttgtgataataataatagctaagccctacctaccaggatggttagaagtaaaacaaaacaaaatgggaaacaagtgttggcattgctgttaggaatataaaatggtacagccactgtggaaaacactttggcagtttctctaaagattaaaggtagaactaccatattacccagaaatttcactcctaagtatataaaagaattgaaacagagcctcaaagagatacttgtgcacccatgtcatagcagcactattctcttttttgtttttttgtgtttttttttttgagacagagtcccattctgtcgaccaggctggagtgcaatggtgtgatctcwgccctctacaacctccgcctcccaggttcaagagattctcttgcctcagactcccaagtagctgggactaaaggcatgcgctaccacacccagctaatttttgtatttttagtagagacggggtttcaccatgttggccaggctggtctcgaactcctgacctcaggtgatctgcccacttcaacctcccaaagtgctgggattacaggcattagccactgcgtctgatcagcagcactattctcaatagccaaaggtggaacaacccaagtgtccatcaacagaagaataaacaaaatggtgtatatacatataatggaatattactcggccttaaaaggaaggcagtcttgatatatgctatataccatgatggaccttggaaacattcggcttcatgaaataagccagacacaggaggacaactgttgtgattccacttgtttgaggtacctacaataggtacattcatagggacagaaagtagaataccagaggctgtggaaagttgggaagggggaattattgtttaatgggtacagagtttttgctgggtatgataaaacaattttgggttatagaaaggtgctagttacacagcaatgtgaatttatttaatgcaactgaattgcatatttaggaatagtaaaaatgataaatattgttaggtatattttaccacaataaagaaaatgcggccaggtgtggtggctcacacctgaatcccagcactttgggagactgaagcaggtggatcacttgagctcaggagtttgagaccagcctgggcaatatggcaaaactctgtctctacaaaaaaatacaaaaactagccaggtgtggtggcacatgcctgtaatcccagctactcagaaggctgaggcagagacttgcttgaacctgggaggcggaggttgcagtgagccgagattgtgccactacgctccagcctgggtgacagagcgagaccctgtctcaaaataataataataaaataataattaaaaaaaaggccggtgcagtggctcacacctgtaatcccaacactttgggaggccgaggcaggggggatcacgaggtcaggagttcgagaccagcctggccaacatggtgaaaccccgtctctactaaaaatacaaaaattagccaagcgtggtggtgggcgcctgtaatcccagctactcgggaggctgaggcagagaattgcttgaacgtgggaggtggaggttgcactgagccgaggttgtgccactgcactccagcctgggcgacagaaaaaaaaaattgttgatctagagtagtgcctctctctctttttttttttttttttttttttgagacgggggtctcgctttgtttgtcatcgaggctggaatgaagtggtgcagtcatagctcactgccacctccatttcctgggctcaagggatcatcctgcctcagcctcccaaagtgctaggattataggtgtaggctactgcacctggctagagcagtggttcttaaagtgtgtttccctgaccaccaccatcagcatcccttgggagcttgttaaaaatgcaaaattttggccgggcgcagtggcttataactgtaatcccactactttgggaagccgaggtgggtggattacttgaggccagtagttcgagaccagcctggccaatatggcgaaaccccatctctacaaaaaatacataaattatctgggcatggtggtgcacgcctgtaatcccagctactcaggaggctgaagcccaagaattgcttgaacctgggaagtggaggttgcagtgaactgagatcacaccactgcactccagcctgggtgacagagcgaggactgtctcaaaaataataataataataataataaaatgaaaagtaaataaaaaacaaaaatgcacattttcaagtcctgccctaggcctgctgaatcagaaactccgaggtgggatccagtaatatgtattttaacgtctctaaatgcatactcaaagtctgacaaccagtgatccagagaatatctagggtgctgttgttgatcaaggaaacatctagaagtgaatttagacattcaggtacagttgaggaagggaagtcttgaatttataaattggctctggaactaggtatagaagcagtctgaactggatgaaagctccaggaatcatttggttctggactagaactgaactgttccctggaagaggaacagcaaggcagacttctcaaagactagcatttatcatgatttttctcatctgaagaaagagcagagtctcttgagatatagaaatggaaccaggatatttgcatggttgcaaagagggcattgagatacctgatgtccactgcagatggcattccctagagagatgcttggcttccaagggagtattgaatgaaacaagacccaggctgttctgattcagccaggaaaacctgccagttttgacaagaccattccatagggggaagctcatgttactccagtgttagttgccctgagagtctggacatgtgagttaacagattttactgtctgggttctgctggggagctgatgcctcactgcagtgaggacatccagattacaggcagctatttaagacttcattctttgtaggtttgcaaatagtctcttaggtacaataagctgatcaacttgtaccattttgtgagaatatatacgtttgttcctgagtttatctgagggcctttttggatttgaaagtattgatctaggccgggcatggtggctcaaacatgtaattccagcactttaggaggctgaggtgggaaaatcacttgagtccaggagtttgagaccagcctgggcaacatggggagaccctgcctctacaaaaaaattttaaaggccaggcgtggtggctcacgcctgtaattctggcacttgggaaggctgaggcgggcggatcacctgaggtcgggagtttgagaccagcctgaccaacatggagaaaccctgtctctactaaaaatacaaaattagccgggcgtggtggtgcatgcctgtaatcccagctacttgggaggctgagacagaagaatcgcttgaacccgggaggcagaagttgtggtgagccaagattgcaccattgcactccagcctgggcaataagagcgaaattctatttcaaaaaaaaaaatttttttttcttttttcagccgggcatggtggcatactcctgtagtcccagctacttgggaggctgaggtgggaggatcatttgagcctgtaaggttgaggctgcagtgacccatgattgtgccactgcaatactccagcctgggtgacagagcaagattctgtcttaaaaaaaatcaaaaaaaaaaaaaaaaaagaaagaaagtattggtctagcaggtttgaaatggctgagatgactgacattgtctaattgtatacttctgaccagcttcatccctttaagggagtaatggagctgtgggtcaaggagacattcagraagagtcctactttcttgagtatgtgactcagactcaggattaattcagttacccagggtacagggttgggtctcagcctcaggaagaatgcaggggccagttagatttggtgcagattagcatcaagtataatctgcaggtcagggccagattagcagcaagtctcacatgcctcatcctagatttttggactagaagtgaacaagtcactctgtcagatccatttggggctttggaactggggcaaaattgagggacgtgaatatgttgtggggggatatatgagcatgaatgtgttactggggcatagagatagaagcagttgtcaggtagctttggttggatggagtggagggaatatagagccaggaagaagaggcaagttactgtgttttcagagctactaacttttctcatctgtcctggattgattctaatttgccggtgaccctcttaaagtttagcactcaggactaaagacagtatcatgaatgaagtctgataggactccttgttttggacactgtgcttctgtaatggtctccaaattcacaataatttttggcagtcttagcaagctgttgattcacagattcaagtctactaagatctttaattcttttcttatgtactcctgttaagtttcatctggtgcttctaaaattgatttacttgcacatatccttaaatttcattttgttagatttaatgtgcactaccatttgttgagtcttatgtcccaagaattttacaaatattaccttttctcccctcttgcaattttgtgtagtattacccccgttttataaatgtcgaaattaaggttcagagaagttaagtaacttgcctggattctaaacagtgagtgatagaatctggaatacaaacccttggctgtctgactctaaaggccgttgctttttagtaccattctagcccattgcaccatccagttttgatcttttggatttgtgttctatttttaccatatatttgttctcttagctaaaggccctccttctgtatggtcagcatgacccagtgcccttatctaaatcttttatgggaccatatctagtttgccggtgactctcttaaagttcagcactcagaactgaagacrgcctaggtgctttttgacttactgtggggttatgtcccaatagacccatcgtaagttgaaaatatcataagttgaaaatgcatttaatacacctaacctactgagcatagcttatcctatgatgttcagctcatatctgagccgcaaacatgctcagagcacttacattagcctagaattaagcaagatcatttaacataaaggtgattttataataaagcattgagtatctcatgtaatttattgaatactgaaagtgaaaaacaaaatggttgtatgggtgttcaaagtacagtttctactgaatgcttatcactgtttttttgttttgttttgttttgtttttttgagacggagtttccctcttgttgcccaggctacagtacaatggtgtgatcttggctcaccgcaacctccgcctcctgggttcaagtgattctactgcctcagcctcccgagtagctgggaatacaggcatgcgccaccatgccccgttaattttctactttttttttttttagtagagatggggtttctctatgttggtcaggctggtctcgaactcccgacctcaggtgatccacccacctcggcctcccaaagtgctggaattacagacgtgagccgccgtgcccggcagtgcttatcacttttgtaccattgttaagtcaaaacaaatttttttttcttttttcttttttcttttttttttttgagatggagtctcactctgtcacccgggctggagtgcaatggtgaaatctcagctcactgtaacctccacctcccaggcagtttccagcaattcttctgcctcagcctcccaagtaactgggactacaggcgtgcaccaccatgcccagctaatttttgtatttttagtggagacggggtttcaccatgttgttcaggctggtctcaaaactcctgacctcaagtgatctgcccacctcagcctctcaaagtgctgagattacaagtatgagccaccatgcctggctaaagtcaaaaaattgtaagtcagaccatcataaattggggactgtctatattacagatgaggtctagtaagcctccttgtttgggatgctacgcctctgtaatgtgctcattgccatcaatgggactaggccagagacagatacagagtaaattaatggaaagagcatgcatggggtgaccagcctgtccaacatagtgaaaccccctctttactaaaaatagaaaaattagctgggctttgtggcacatgcctgtagtcccagctatttgggaggcagaggcaggagaatcacttgaacccacctgggaggcagaggtttcagtgagctgagattgtggcactgcactccagtatgggtgacagagcgagactccgtttcaaaaagaaaaagagcgtgggttttagagtcagacttggttttgcaatcttggttgtatcatgggaagcaatgtgacttggtgaagtcctaacttctctgggccttcatttcctcatatttaaaatgtcttaacagccctcggcagggtggttggtgcatgcctgtagtcccagctacactggagcctgaggcaggaggatcccttgatctcaggaattcaagttcagcctgggcaacagtgagatttcatgtctgaaaaaaatttttttaaaagtcttaatatctacaaatgggcctgttggaaaggttgaataaaacatggatgtaaagtacttgcctcatggcccagcacactataagcactcagtaaacattggtctgtttgtctctctccttccaggcttttcctttaaaatcttttaatttttggccaggcacattgactcatgcctgtaatcccaacactttgggtggccaaagaaggaagatcgcttgagcctagttcaagagcagcctggccaacacagtgagaccctgctcaacaaaaaagaaaaaaaaactttttatttttattatttatttattttccaagatggagtttcactctttttgcccaggttggagtgcagtggtgcgatctttggcttcactgcaaccttctcccgggtttcaaggcgattctcctgcctctgcctccctaatagttgggattacaggcatgcgccactacacccagctaattttgtgtttttagtaaagatggggtttcaccatgttggacaggctggtctggaactcctgacctcaaatgatccgtccacctcggcctcccaaagtgctgggattacaggcgtnnnnnnnnnnnnnnnnnnnncctgcacccagccatctttttattttttatgtcctttaaaattgaccccactggttgggcatggtggctcacgcctgtaatcccagcactttgggaggccaaggcaggtggatcacctgaggtcaggagttcgagactagcctggccaacatggtgaaaccccgtctctactgaaagtacaaaaatcagctggatgtagtggcgggtgcctgtaatcccagctactcgggaggctaaggcaggagaatcgcttgaatccgggaggtggaggttgcagtgagccgagatagcgccattgcactccagcctgggtgaagaagcaagactctgtctcaaaaaaaaaaaaaaaacgtttatcaggctgccttggagttctcaggattgtcagattgttagggtctctgctgttttgaaattcatttctctctatttacagggcttattttttcccacttcaaactgaacattgtacttgatagagaaacggaaaaaggagtttatcaagacagttttttttttggtgggggtgggggtagacaagggtcttactcggtcactcaggcaagagtacagggatgcagtcatggctcactgcagccttaacttcccatgcttaagcaatcctcccacctcagcctcccgagtagctgggactataggcatgctttaccacacctggctaattttttaattttagtagagacgagggcttgccatgttgcttaggctggttttgaacccgtggtctcaagcaatccttccgccccagccttccaaggtctagacagttctcacaaaacccttcttgttatccttagctttattaacaagccttgcctcattatgggctgttacttttcttttaggttagagccaccactcttttttttaactatgccttctgttttttgtacgtgtttgtgagtggccttttaacatctgtactcaagaatgcttttcgattgtgctagtctcttcagattgttccctttttaaatttgaaattagccagatgtggtggcttacacctgtaatcccagcattttgggaggctgaggtaggcagatcgcttgaactgaggagttaagagaccagcttgggcaacatggtgaaacctcgtctctacaaaaaatacagaaattagccaagtgtggtggtccacccctgtagtcccaactactcaggaggctgaggcaggaggatcacttgcacctgggaggtcaagactgcagtgagccatgtcctcaccactgtaatccagcctgagttacagagtgagaccttgtctcaaagaaaaaaaaatgaaattggaataatttataattaattgcataattcatattatctcacttttaaggatttctttaaaaaacaccagcatctggctgggtgtggtggctcacacctgttaatcccagcactttgggaggctgagatgggaggattgcttgagcccaggagtttgaaattacagtggactatgattgccccactgcactccagccttggttacagagggagaccctgtttctatttttctttttttgaaatttttggctgggtgtggtggctcatgcctataatcccagtactttgggaggctgaggcgggcggatcacaaggtcaggagatcgagaccattctggctaacacggtgaaaccccgtctctattaaaaatacaaaaaattagccgggcgtggtggcgggcgcctgtagtcccagctactcgggaggctgaggcaggagaatggcgtgaaccctggtggcagagcttgcagtgagccaagatcgcgcccctgcactccagcctgggtgacagagcaagactcygtctcaaaaaaaaaaaaaaaaaaatttccccttgtctctaaaggaaaaaacaaaaacaaaaattaaaacaaaaaagcaataccaccatctgtcttctctttagaagttcatattatgatattagtctgggcgtggtggttcatgcctgtaatcccagcactttgggaggctgaggtgagcagatcacgaaatcaggagttcaagaccaacctggccaacatggcaaaaccctatctctattaaaagtgcaaaaattagctgggcatggtggtgggcgcctgtaatcccagctacttgggaggctgaggcaggagaatagcttgaacctgggaggtggaggttgcagtgagccgagatcgtcccattgcactctagcctgggtgacaagagtgagattccatctcaaaaaaaaaaaaagaagaagtttatattatgatattttaatttagttaaatctgcattttgaaagcactgtaatacagtggttataatgtggattctctagagtcagaaaacctgtgttctgattcaggctctaccacttttcttgttctgggactttggacaagttacctaacagttcgaaatctgttttctcaactgtaatatagggataataatagtatcaatctttaagggctattgagagaatttgataatctatctaaatcttagtctctgacttgtgattagaactctgtacccagtaggggccaggcatggtggcttacacctgtaatcccagcactttgggaggctgaggcaagtggatcacttgagatcaggagttcgacaatagcctggctaatatggtgaaaccccatctctgctaaaaatacaaaaattagccgggtgtggtggcgcatgcctgtaatcccagctactcaggaggctgaggcaggagaattgcttgaacccaggaggccgaggttgcagtgagccaagattgagtcactgcactccagcctgggtgacagagcgaggcttcgtctcaaaaaaaaaaaaaaagaaccctatatccagtaaatattagctattgttaaggtctggtgttacttaatgcagtgtagttaagttttacacaatgccttcaaggatagccagttatttgatcatgcgagacagcataggcagnnnnnnnnnnnnnnnnnnnncataggcaggtttccttttttggatgagaaaatgtatggcacagaggttttttttgtcttgttttgttttttgttttgttttgtctgccaccacgcctggctaatttatgtatttttagtagagacggggtttcaccatgttggccaggctggtcttgaactcttgacctcatgatccacctgccttggcctcccaaagtgctgggattaccggtgtgagccactgtgcctggcctttttttttttttttttttttgagacagagtcttgctctgtcggccaagctgaagtgcagtggtgctatctcagctcactgcaacctctgcctcccgtgttcaagcgattctcctgcctcagcctccctagtagctaggactacaggtgcacaccaccacatctggtaatgtttttgtatttttagtagagacaaagtttcaccatttggccagctggtttcaaactcctgacctcaggtgatccacccacccaggcctcccaaagtgctgggattacaggcatgagccaccgtgcctggcctggcacaggtggtttttgacttgcctgagtgagagttctgctgtggcagaactgggtctttaatgtagggtgactagtgctctgtctagaacttgcattcttaactgcctcctgttgacaacacttagttgttggctatcacactgttaaggattatgtggttactttcttcttgaaaccctttcaatttttcatctagtatttctccttagtctggataatgtccagtgtagtcgttctcttatcattttaggatgaaactgtccacaagaatttatcaggctttctgtgcccacccaccctttttaagttaaatgtgatatccagcaaatgtcaaggttaatgaagttctctatttcttttttttttttgagacagagtcttgctctgtcgcccaggctagagtgcagtggcatgatctcggctcactgcaacttctgcctcccaggttgaagcgattctcctgcctcagcctcctgagtagctgggagtacaggcatgtgccaccatgcctggcttattttttatgcttttagtagagatggggtttcaccatgttagccaggctggtcttgaactcctgacctcgtgatctgcccgcctcggcctcccaaagtactgggattacaggcgtgaggcactgcgcctggctgaagttccctatttctatacaccattatcaccctgacaattttgggatctgagtcaagaaaacaatctatattttctgttattgagaagtttgaaggggtctcccagtagctgtatcatgtccattactctcttttatcctcattcagaaattttctactgtggtttgtggatttctccagggaatatcattttgggatgtgctgtcattccacttcccctcttgagatctgaattacttacttttgtttgtaaaagacaaaaataaataagtaaaaataataaagatttgaattccatttgcccattagttggtgtattgtgttcacagttctgccagactcagatttttatgggtagagaccatgtcttacttattttacaaaatccataaatttactttaatctattttttcagacagaatcttgctctgtcacccaggctggagtgcagtgatgtgatcttggctcactgcatcctcccatccctggctcaagcaattctcgtgcctcagcttcccaagtagctgggactacaggcgtgcgccaccacacccagctaatttttgtatttttagtagagacggggtttcgccatgttggccaggctgttgtcatgatgtcgaactcctgatctcaagtgattccacctgcctccgcctcccaaagtgctgggrttacaggcatgagccaccgcgcctggccataaatttattttaaattattttattttgtatatcctattatagatgtctgacgttaagatattggcagggaattaagatatctaatttccagatagtttcttctgtgatttaatagtcacctctttcattgcttttcttctcatgttattttcctgatgttctttcccagttttatttaggaattttttgctgtcctcttactttattttattttgttttgttttgttttactttattttaaatcttttctagagatgggggggtctcactatgttgcccaggctggtcttgaactcctggggtcaagcattctactcatctcagcctcccatagtgttgggattacaagtgtgaaccaccatgctcggccctctcctgtattttaaattttaagttcccataatcagattggcaagtgttcaaatgtgttcttcctactctctgaaccacactcttttagcaggccaagagcccatcaccattgacacatttacttatcagaatggtgtcactatgcttggtgttgagtatgcagttgtggcacagaacccttggcccctgcatcttcccaagcttacagtttagtgggagcagatagacaataacatgctttataatactgtttggtcagtgcttggctggaaagcagtagaaatttataggatgaagtaggatttaggctgacctgaaggagaaataggaataagccaggtttgggagtagaggaagggtaagaatgttttagcatgatctggaaagccaacttcaatttcctcacagccattcacattcctcctttctttcctaaagtctaagctatcagttggaagaagagaaaaaaaaaatgttaccaaaggcccctcccactctctatgtttaccaagctctttaaatttttttttcccccagaaagactttacaggtttcttctggttgtgtggttcactcactctttagcggcatgagtggcagttggcaagctgtctacaggttcttgtggagagtgtgaccagctacctctgttacctccctctgggaacctagatgatgttgctcttgttggtggatgaggagcttcttgtttttgtgtgtgtgtgttttgtttgtttgttgttgttttgctttttgagacaggttctgctctgtcacccaggctggaacacagtggcatcatcacagctcactgtagacttggactcccaggctcaagtgatcctcccccttcagcctcctgctaggaccacagcagtacactgccacacccggctaatttattttcatatgttgtggagattggataaccctgtgttgtccaggctggtttcaaattcctgggctcaaacgatcctcctgccttggcctccaaagtgttgggattatgggtgtgagcccccacgcctggccaggagctgcttgtttactcggcaggtttcgtttttttccgtttctcttctgtgttatattctgcctctcaacctcctaacatgaattttctcctatgacaatttagaattgtttacttccttgttttccttgtttacctatttcctctgttgtctctgggaattcttcatcctctttgataactttggcctggcaagtgttttttaaacctgagaggagagatgccagcttgtgtttagtaaatatgctattggcaaatgcctccagcaggaaagtgagagtggcacactcctcgttgaagcatccccatctarggctagcagttcgtgaaacagctgtcatcctttacccctgtgtagagctccctaactcatttttttggccctgaaatgaagattaccaacaaacttattattgtttggtggcatagtttcaaaaatattatgttcaaaaattcctgttatgtatattttagttaaaggctatataaaactaatatgttttattgttatttttttgagtggataatatagtcatacgatttaaacttaaaaagatacagaaaggaatatggaaaatattaatcttctcaccatgtctcccagctacctagttctcctctgagacagctgatgctaccagtttcttatttattcttccagagtaattttgtgcatagatcaacaaacaaatgacatatatattacccaataagatgaatgatatgtgtcttgtatgtctcatgcccatttagtgaagtggaaagactataaggatttgaaaagacttggattcagtgctcaaaacctcagctctgccatttattggttgagtaaccttggacagtttgcttcggctctgtgagcctttgatttctttatgcggttaataatacctagcttgtcagtgttgagtatgatgtagtatggttccttctctggtatatcttaaatgcttcacacatggttactactactgtgatttcttgcaggactttgctctttggtctgtgtgaactgggaggggcaaaatcttgctctagaaaaatgaagggcagccataaaaaatgatgagttcatgtcctttgtagggacatggatgaaactggaaaacatcattctcagcaaagtattgcaaggacaaaaaacgaaacactgcatgttctcactcataggtgggaattgaacagtgagaacacatggacacaggaaggggaacattacacaccggggactgtcgtggggtggggggaggggggagggatagcattnnnnnnnnnnnnnnnnnnnnttaaatgggtgcaagcacatcaaaccatgggcacatgtaatacataatgtaacaaaccctgccacattgtgcacatgtacccgaaaaacttaaaaagtataattaaaaaaaaaaagccaaaaaaaaaatgaagggattgaattgccttcctttaatatgtgactaatgctgtcttatgtgtacaaaggaaccatgagccaaaggagacagaaatagcatttgaaaaggaatagaacattttctgctcatcaggtattggagacaaactattcctgatctggggctgtcacacttggctggtggagtgctgataaaccttagcccttcacttctgctggtaggaagtcattaacactgaggagcttttcgtgtttaacagttcagttaactctggcccctcagtgttgcctgaagctttggactcagatgggaaacttcacttggtcaaccctggtttcctgttgatccgttcccagtgggatattaatcctttaatagcagttagctttttttcttcttgggttcttgcataatgcttgatgtggtagatggaagagtcccatggtttcagaaccatcctatttggtttcattaggcagatgggtgttaggcctttcttcatggttatttggccttaccctttctgatgagatttgtagggctttgagtttgaagtgcacatagtcccttaacggatgaacaagaaagactttctatcttgcaacatgtggatatcagaataaagagacctgataatatgggttatcttttaaaggaagaaaatgtttgtaaactcattgtgaaagattctgtgccacatgtagttttaagcagttggttctgagttcccaatatacatttatccagattgctgggagtagacctattaatgatttatattttattttattttattttattttatttttgagatggcatcttgctctgtcaccaggctggagtgcagtggcaccatctcggctcactgcaacctctgcctcctaggttcaggcgattcttctgcctcagcctctgagtagctgggactacaggtgcacgccaccactcccagctaatttttgtatttttagcagagacggggtttcaccatgttccaggatggtctcaatctcaggaggctgaggcaggagaactgcttgaacctgggaggtggaggttgcagtgagctgagatcgcactactgcactccaacctaggtgacagagtaagactccgtctcaaaaacaaaaaataataaaggccaggtgcagtggctcacgcctgtaatcccagcactttgagaggctgaggcaggcggatcaggaggtcaggagatcaagaccatcctggctaacacggtgaaatcccgtctctactaaaaatacaaaaaattagccaggcatggtggcgcgcacctgtagttacagctactggggaggctgaggcaggagaatggtgtgaacctgggaggcggagcttgcagtgagccgagatcatgccactgcactccagcctgggcgacagagcgagactctgtctcaaaaaattaattaattaattaataataataataataaaatgagggcaggtgtggtggatcatgcctgtaatcccagcgcttcagtaggctaatgggggaagatcactggaggccaggagtgcgacaccagtctcggctggtgagaccctatctctacaaaaattaaaaaagtagccagatgtggtggcacacacctgtagttccagctactagggaggctgaggcaggagaatcatttgagcctaggacttcaaggttacactgagctatgatcatgccactgcactcaagcctgggcaagagcaagatcctgtctctttttttttattttttatttttttattttttgagacagggtttcactgttacccaggctgaagtgcagtggtgtgatcacagctcactgcagcctggacctcctaggctcaagtgatcctcctacctcagcctcctgagtacctgggactacaggtgtgcaccaccacacctggctaatttttaattttttttttagagacgaggtttccctgtgttgcccaggctggtctcaaactcctgggctcaagcgatcctcccacctcagcttcccaaagtgcttggattacgggcatgagtcatctcgtcccacctggatcatcctttttttgttttaaatagagacaggatctcactatgttatccatgctggtctcaaggaatcctcccacctcagcctcccaaaatgctggaattatgtgtcacctcacctagcagccgcctggatcattcttgcagcaactgaaaagtacaaacaggaaggcagcagaagtagtgcttccaatcagacctgattcacatttttctttctttctttctttctttctttttttttttttttttttagagacagagtcttgctctgtcacccaggctggtgcgatctcagctcactgcaacctccacctcctgggtttaagcgattctcctgcttcagcctcctgaatggctgggattacaggcatgtgccaccacgtctggctaatttttgtatttttagtagagacagagttttgccatgttggccaggctggtctcgaactcttgagatccacctgccttgtcttcccaaagtgctaggattacaggcgtgagccaacatgcccggccacacattatttttaaaaaagtatttacagtgcactcaaacttagttgactctattcccttttctttcattgtgcctatttatttgctctatctcaatggactaaacttttgtaaaagtcagtttcacttttgttttttatttctgatgctttccttcaaaaaggcagagaaactgaggggtattttatgtctttaaattttttaatgatacctttataggtcttagccataaggaattctatacttcacacttcctaataaataaaacgtgacatataatttagaagttcacacattcaggccagacgtggcggctcttgcctataatcgcagcactttgggaggtcaggggagttgcttgaggcggattacttgaggccaggagttcgagaccagcctggccaacatggtgaaaccccgtctccactaaaaatacaaaagttagcctggcgtggtggtgcgcgcctgtaatcccagctactcaggaggctgaggcagaagaatcacttgaacctgggaggccaaggttgcagtgagccgagatcacaccgctgcactccagcctgggtgacagagggagattctatctcaaaaaacaacaataaaaaagttcacatattcaaatgggtgaacatttctacctttcgtggtcctccaattaaatcttctctactaggctgggcgcggtggctcatgcctgtaatcccagcactttgggaggctgaggcgggcggatcatgaggtcaggagttcgagaccacgtctggccaacgtagtgaaaccccgtctctactaaaaacacacacaaaaagtaggcaggtacgcctgtaatcccagcttctcgggaggctgaggcaggagaatcacttgaacttgggaggcagaggttgcagtgagccaagattgtgcgattgcactccagcctgggtggcagtgcgagactccatctcaaaaaaaaaaaaaaatcttctaaataccaacttccttcagagagaagatagtaaatgtaatttgtttactaaagataaatcactggccgggcacagtggctcacgcctataatcccagcactttgggaggccaaggcgggcggatcatgaggtcgagagatcaagaccatcctggccaaaatggtgaaacacctgagattacaggcgtgagccaccacgcccggccaaaaaaaaattttttaaaggttgcttatagttatcttccaatgctgtttcccagttcattttctttctttctttctttctttcttttttattttttttatagagactgggtcttgctttgttgcctaggctggtctggaactactggattcaagtgatcctcctgcctcagcctcacaaagtgttggggttacaggtgtgaagcattacacccagccccagttcattttctctccccagaggtgaccattattaccagttttttgtgtatcctacaaatatttatgtgcatatctaaattcctataatactttttgcttactaatagtcatattacttgtttcatatactgtatacttagatatacactgtgtggtttctgaattttattctcttctttaacattcctttttttttttgagacagggtctggctgtgtcacccaggctggggggccatgcagtggtacagtttcagctcactgcagcctctgcctcccgggcttaagtgatcctcccacttgtgggactgtaggcgtgtgccatcatgctgggcgaatttttgtattttttgtagagacggggttttgtcatgttcctcaggctggtcacgaactcctgagatcaagcagtctgcccacttcggcctcccagagtgctgggattatagattggagccaccacacctggcctaaaattcctgtctttttgcatcaggttgttacgcatcttttggcttctgttaggtatgaccttcagtgcaatgttacatagtggtggtaatagcaggtacctgctggccttctcatctttaatagaaaaaaattacggggcctatgtgtgatggattttacgcagtgcattttcagcatctgttgagaaggttatatacttttttttcctttcctrttaacataaaaattgctttgatagatctcctgatgttaaaccaagtctttacattcctcggagaagcctgtaatgtgagagctatctttactgtgaagctttgtgtgtgtgtgtgttttgttttgttttgttttgtttcgagacaaagtcttgctctctctcccaggctggagtacagtggcacaatcttggctcactgcaacctctgcctcctgggttcaagtgattctcctgcctcagcctcctgagtagctgggattacaggcaggcaccaccacacacagctaatttttgtatttttagaagagacagggtttcactatgttggccaggctggtcttgaacgcctgacctcaggtgatccgcctgccttggcctcccaaagtgctgggattacaggtgtgagccaccacgcctggcctttttttttttttttttttttttgagatggagtctccctctgttgccctgctggagtgcagtggcaccatctcggctcactgcaacctccgcctcctgagttcaagtgattctcctgcctcagcctcccgagtagctgggactacaggtgcgcaccaccacgcccagctaagttttttgcatttttaatagaggtgggggtttcaccgtgttggccaggatggtcttgatctcttaacctcatggtccacccacctaagcctcccaaagtgctgggattacaggcgtgagccaccgagcctggccttttttttttttttttttttttttttttagggaagatatttgacgattcctcttgtttttgtttagatcaccatttatttgattttcagcaatcactagtttttttttttttttttttttgagacggagtctcactgtgtcacccaggctggagtgcaatggcatgatctcggctcactgcaacctcagcctcctggattcaagcaattctcttgcctcagcctcctgagtagttgggattacaggcgcccaccaccatgcccagctaagttttgtatttttagtagagacggagttttgccatattggtcaggctggtctcgaattcctgacctcaggtgatccgcctgccttggcctcccaaagtgctgggattacaggtgtgagccaccatgcctggcctgcaatcactagtatttctaaaagaaaattgtaaaagttcctttgttcttcatcttctgtctgccctctaaatgttaataatattgagacttcaataattaattcattcattcatcatagatatttattaagtaagtgctttgtgccaggcacagtgctaggaactaggtgaataaaatagatatgatccctgtcttcagggaacttacctccctgttgctagattttttttcctttcagtctgacttccccactgcttatagttatttttttgaggtgggagaggggaaccaaactcatcatctcatccctttgcttaaagatctctattgaatcttttatgtttataggatcatgtctggaatttgaagtacagcatacaagggccttcccagtctggttcagcccccctgttcacacatctcccaccattctccctcatacacattggacacactagctatatgatatccccaataagccctgttctttcatgaccctgatttgaaacattttgttctctgactagaatacttttctctgcctgacagattcctactcatccttcaaggcactcctaaaaaaattttttttatatccatagagagagtttgaatcccatagcattctgttcatagaaccttcctagaatttattacattatgtggtaaagatgtatttatacatctgtctccatagttaaatgattgtaaactgcttggaatagggtctttatgtctctatgttgtgtcttctcacttgatcttagcgaaaggccaagaagcgatctatgttgtgtcttctcaacaactactgtactgattagcacagaatgggccctcagcaaatatttgttgtgaatgtttgactaatcctttcttttccccttcccttaagtttttctttaaatgtgtgtgtgcacagattatgactggccttttactttttgcaaatttttgttattacattgttttataatacgataaaatcagaaaatatacttaaaacttttcccaaatgcagtaagagcctatttaagaaagcattatctcttttaaaatcacattttaagaaaaggcaatgttttcctgagaagtggaaaatatttgagataaaccagtaaatattaaagggactggatttgtttccttttttggtacattaacaaagtgcttatggaaaaatcgtagttttagtttggaaattcatcaaacctcttgctgccttatagcaaaccagtgtgtctttgctcagagtctcacctagcagattaatatgggctgaagagatcaatagatataaaaaggcagtaatcacaatgaaggagagaggggggaaacaggtcatgagaggaaggtagttcattaatgcatccatcactgaaataatggagaaatggcatatttgttgaaatacagaagtatcttcaaatttgttaaaagccagacattgcatcttatcttgaatcactttccttatttaggtcttcattgcaggatgactgactgcattttttcatggtgtttgttctgcacaacacctgtaatcaacacctgtttctttattgtattgagacctctccatagtttgcgctgttaaaaggagcttgtgcctaggatggcattgttaatctctggagctgccagagaagtctgagagtagggacaaaaagatgggaactgaagtctaaatacttctggcctcagctttttctttatagccacagagccttgaataaggaataattggtcctttaaaaagtgttttcagttgaggccgggcgcggtggctcaggcctgtaatcccagcactttgggaggccgaggcaggtggatcacgaggtcaagggatcgagaccatacctggccaacatagtgaaaccccgtctctactaaaaatacaaaaaaatagccaggcatggtggcggccgcctgtagtcccagctactcaggaggctgaggcaggagaatggcgtgaacccannnnnnnnnnnnnnnnnnnnnnnnnnnnnnnnnnnnnnnnnnnnnnnnnnnnnnnnnnnnnnnnnnnnnatcttggcttactgcagcctctgcctcctgggttcaagctattctcccgcatcagcctcctgagtagctgggattacaggcgcaagccagcacacctggttaatttttgttttcttagtagagacgaggtttcaccctgttggccaggctggtctcaaacttctgacctcaggtgatccacctgcctcggcctcccaaggtgctgggattataggcgtgaaccattgcacctggccttttttttttttttttgagatagagtctcactcagtcacccaggctggactgcagtggtatgatcttggccctctgcagccttggcmtcctaggctcaagcactcctcccacctcagccccccgagtagctgggaccacaggcatgtgccaccatgcatggctaatttttaaatttttttgtagagatggggtctcaccatgttgcccaggctggtctctaactcctgggctcaagcagtcttcccaccttggccttccaaagtgctgggattacagatgtgagccaccactcccagcctgaacacatatttctagtttaaatgtatggttttgtataaaatggattagagagattgcattgatacagactaaagggaagcaacagaggtcatatgattctaagaaattctatctttgttgaaagaagttttagtgtgaaatgaccagagtaaagaaaaaagagaatgaacattcatccattcagagactaccaagtgctaggtatggtagtgggtgctcttccatccgtttctcattcaaggtgaggaaattgtggctcagagaggttaaatgacttgcccaaataacacacagtagtgaataagaagatggattggttctttataatccccaaaaccacactaaactttctcctttgttgctaggtaactgatatttcaggagacagaagttttttgtttatttcaagagcaggtttcttacaggtctggctcttcactctcctaggttgtcttgggatataggatttaaggtactacctgtggaactgagagtgccagcacattattcttgtcctcttgagtggctagttccttgcccaaagctcatctcaaaattatagctgctcttgggagtttgatgtaacatggaggctatgttgttggttttattctctctgataccattatttcaacactaatgaattgtgtccagggtgtaccctgcttaattgacagctttctcagctgttttatagcaggttctctagtatctttatcttcatggccatagtcaagaaacttgtttttatttatttaaacatggttgtgggagaagtagataattatagtatgctttttgactatgcaggaacaaatcttacccttgaggccaggcacggtggctcatgcctgtaattccagcactttgggaggctgaggcaggtggatttcttgagcccaggagttsgagatcagcctgggctacatggtgaaaccccatctctactaaaaaatgcaaaaattagccaggcatggtgacgtgtgcatgtagtctcagctacttggaaaggctgaggcaggaggatcaattgagcccaggaggtcgaggctgcagtgagccatgattgctccactccatcctcggtgacaaagcaacaacctgtctcaaaaaagcaaaacaaaacaaatcttacccttacctgaaaaactggttaaggagggttgtaagtggtaatgttagtttctccatatatcaattcagaccttatcccaaaggaagaccagagctgtttgaactccagctcttccttagctgccaggtgttaacaacttgtgtttcataagcatagatagattcaaaccattgtcctggagttaaaatattttctaagctgtgactcatcttttggctcattctttctttcactaggaaataaactgagttttaatttygagaatttcaattatcccttctgaagactgtgttgctgattaaagttgctgggacttgtttttctggtaaccagcagagctacaaattactttgtactcagtggtcatgttaaacctatgtgtaagcagagggagaaatctgattaactgtctaaaggaaggttgttgaagatgaggccattctttctgactccttttagaggttcatctcttccaccagagggatgggtgtgcaggagggtgaatctgaggctgaacagagcaggtgctacgcatgtgtatttgtatctgtaaatatcacatcactgtttatagtacactggactctacatgcaaggcctggtcaggccaaaccaggaggaattgttcctgtgcttaaagccaagaataacatcctgaccagcagggggacagaggtcagctcaaggcaacagctcttgggagctacagaacattaaggaccttggaggaactgagcttaataaaaaggaaggcaagatgtactttgaaggaagtgtgtgaaacctgcatgcctttctcttattaggacatggtttatttatgaaaaatgaaaagttatctttttttttttttgagacagagtctcgcactgtctcctgggctggaatgcagtggcacgatcttggatcactgcaacctctgcctcctgggttcaagcgattctactgcctcagcctcccacgtagctgggattacaggcacctgccaccacaccctgttaattgtttgtattttcagtagagacagggtttcattcactatgttggccaggctggtctcgaacccctgacctcatgatctgcccaccttggcttcccaaagtgctgggtttacagrggcgagccactgtgcccagccaaaaaatgaaaatttatcttaacagatggatatgtgatgagttcatatcacctcttggtcatttacattttccacttctacttatacattgatttatccgttgattattttttattagaaattgtatacccagctaagtagcaggaaaaatatgttctattattctggtgttttattctataagcaacatcagagaggcccactagagaactgtatttaaaggataataggttaattaaaaaacaggtaccatgtctcggccgggggtggtggctcacgcctgtaatcccagcatttgggaggccgaggcaggtggatcacgaggtgaggagatcgagaccatcccagctaacatggtgaaaccctgtctctattaaaaatacaaaaaaattagccgggtgtggtggcgggagcctgaagcaggagaatggcgtgaacccgggaggtggagcttgccaggagccaagattgcgccactgtactccagcctgggcgacagagcgagattctgtctcaaaagaaaaaaaaaaagcagaaaaaacaaaaaacaaaaacaggtaccatgtctcctggggaatttactgactggctagagttttatttctgggatctttctgtgctcacttctttttccttccatctttcctcattttgatgctggccactcactccacagaggcaattcaaactattttctgaaggagcattctaagtttgtcctgttgtcttctctgggactcatttctctggcgtggcttcagctggttccaggccagaatgatcttctgaaagcttttcttcatggcctttatttcttggctcttttcatgcactttgcctgattggttttgctggttctttccttctccaatggtgtaagctatgttgccttaatcgtaaggctctaaagctcaggtgcagcctcaggccgtttagactttcctggggtttataaagtacttttgtcctttcctagaaattgggggatgaatcagatgctctgttatgaggtattgctgactctcctgggattttagtttgccagttgtttaaatagtgtgtagcaatttgaattgtatttgtaaggtaggacttgttgccaagactccgaagtaggtcattgctattatgctttttctctttatttttcttatatatattatatataatataaaatatacattataataataaaaatatatattataatatataatataatatataataatatataatatatcgtaatatataatatatcataatatataatatattataatatatattatattatattatgatatattataatatattctattatatattatattataataattataataatatattatattatatatattatataataatatatattatatatattataatataatatatatataattagtatattatataatatatattatagtatattataatataataatatatattatagtatattataatataataatatatattatagtatattataatataataatatatattatagtatattataatataataatatatattatagtatattataatataataatattatataataaattatattataatatattataatataatatattataatatatatttttattattataatatatattttataataataataatatattatatattataatataatatataataatataatatgtaatatatataatgtaatatatatatctattatagagacaggatctcactacgttggccaggctgatcttgaattggcctcagtgatcttcctgccttggcctcccggagtgctaggattacaggcatgagccaccgtgcctagccctccctttctttttctttctttctttctttcttttctttttttttttttttttttgagatggagtctctctctgtcgctcaggctggagtgcagtggtgcgatcttggctcactacaaccccacctcctggttcaagcgattcttctgcctcagcctcctgactagccgggagcacaggcgcatgccaccatgcccagctaatttttgtatttttagtagagacggggtttcaccatattggccaggctggtctcgagctcctgacctcgtgatctgccctcggcctcccaaagtgctgggattacaggcataagccaacacgcccagccattttttttttctttgaaacagagtcttgctctgtyacccaggctggagtgcaatggcacaatcttggctcactgcaacctccacatcctgggttcaagcaattttcctgccttagcctcctgagtagctgggattacagacatgcaccaccatgcctggctgatttttgtatttttaatagtgacagggtttcaccatgttggccaggctggtctcgaactcctgacctcaaatgatccacccgccttggcttcccaaagtgctgggattatagttgtgggccaccgtgcccggtcctccctttatttttcaattgaaaaattagcaaagacagaattacnnnnnnnnnnnnnnnnnnnnnnnnnnnnnnnnnnnnnnnnnnnnnnnnnnnnnnnnnnnnnnnnnnnnnnnnnnnnnnnnnnnnnnnnnnnnnnnnnnnnnnnnnnnnnnnnnnnnnnnnnnnnnnnnnnnnnnnnnnnnnnnnnnnnnnnnnnnnnnnnnnnnnnnnnnnnnnnnnnnnnnnnncagcactttgggaggccgaggcggacggatcatgaggtcaggagttggagaccagcctggccaatatggtgaaaccttgcctctactaaaaatacaaaaattagccaggcgtggtggtgtgcccctgtagtcccagctactcgggaggctgaggcagaagaatcacttgaaccctggaggcagaggttgcagtgagccaagatcgcaccactgcactccagcctgggtgacagagtgagactatctaaaaaaaaaattccaatttagctcacagatgcaatcccagctctttgggaatgcgagatggaatgatcacttgagcactggagttcaagaccagcctggccaacaaagggagtcctcgtctctacaaaaaatcaaaaaaattatccaggcatggtggtgtgcacctgtagtcacagctactcggaaggcggggacaggaggatcccttgagcccaggagtttgaggctgcaatgagcagtaattgtgccactgcactgcagtctgctgggtgacagagtgagatattgtctcaaaaaaaaaaaaaaaaaaaatgtgctgagggcagtggctcatgcctgtaatcccagcactttgagagggatcatgagaggatcgcttgagccccggagtttgagaccaatcctgggctatgtagtgagaccttgtctctactaaaaataacaaagaaaaaaattactgggtgtgatgacatatgccatgcctatagtcccagctactcgagaggctgaggctggaggattgtttgagcccaggtggtcgaagctgcagtgagccaagattgtgccactacattccagcctgggtcacagagtgagaccctgtctcaaaaaaagaaaaaaaaaaatcccaatttaaatcattctaaaatgaagaaacagaaaagtagtttgtctaaaaaggaaattggttataatgtaaggagaaataggatgagagtgcataaaagaacatgaattagttgagagatagaaacagttctggaagcaggcatcttgccagcctgggtcagacagtaaaaatgaaaattttcctcccctttccaaaaccactatccagaggggctgttattgactctgggtactagtatccagttttggggttgccatataaagcatgaagaggtccagtggggtcagttagcacaaagaatagctgctcttttgattggctaagttcttcttaataattttactggcctcaaattccaaagccaaaaccattttctgattcttttgctgtgtccatttggcttgtgggaccaaagcagcagctgagactgctatactacactgcattaggcaataatccttcggaaggcctggccacttttctttttgttttctttttttttctttctttctttttttttttgagacagtttcgctcttgttgcccaggctggagtgcaatggcatgatctcagctcactgcaacctctgcctcttgggtttaagcagttctcctacctcagcctcccaagtagctgacattacaggcgtgcgccaccacatccggctagttttgtatttttagtagagatggatggagtttcaccatgttggtcaggctagtcttgaactcctgacctcaagtgatcctcccacctctacctcccaaagtgtggcctcccaaaatttttaaatttttttattttttgctttgggactagtaatttgcatctcatttaggatccctcttctcccccctcattttttcatgcatacctgcactaagtcctgtattctgaannnnnnnnnnnnnnnnnnnnatctggcttctggcctcattgaattatacaaattttaactatgtctggtttcagacctgtttctacctttttgtttgtctttccctgctccctgtagcaaactgggttcagacttgcttggagaagggatgatagttttcacttgtttgttttttgactccataaatatgctctcttcttactaattattctttctttctttgtcaaacaggctaccaagcagtttctcgaagagattaacaagtggacagttcagtacaatgtttccccgctgtcttggaatgtggctgtcaagttcctcatggcaaggaagtttgatgtgctccgtgccatagaattgttccactcctacagagtatgtggctcaggggtagaccagacctgtggcagttgggttaagtgttgctgttgtccctgtcatgctcgacacacacattggttctctaagtgttcctcctcactttcataaaaaatggatccatatccaggagcccttgtgagagctgaagctgggcaaggcagctactggaaggcactacttttgtacctaagttttgatcgtagaccaggatgccacatctaatgattgagacggaggaagtagcctgacagcatcctggtggcaggataggggttcacccttcctagagttttaatcctagctcttttcattggcctctggccacatgaaaatcttggttttcaggttgtctaaggcttttagaaacttgccattcagatgaatgatgagcttagtgggcagttcaggaagggaagttttaacactggaaaagaagagcaactgtgtattagctaggtccattatcttaaagtatctttatgcaaatgtagcggcatcaggattttactttgttttgatttttgttttttgagggggcatagactttggttttgtgcttgtttgctttctcagttagtagtgtctttgataaaacactatacagcatgttactttggggtcagaatccttctaaagaaatacaaaatctccctaaaaaaaaaaattgggataacaagcactaggattagcttaactgaagtttggttacatctgtcttgtggaccagctcattcaatattcattcatttactcaacagatacttattttatacttactgtgttccaggtgcagagattactatttagaaagagagactagggctgggtgcggtggctcatgcctgtaatctcagcactttgggaggccaaggcaggtggatcacttgaggtcaggagtttgagaccagcctgaacaaaatggcaaaaccgcatctctactaaaactacaaaaattagctgggtgtagtggcacctgtattcccagctactcgggaggctgaggagggacaatcacttgaaccaaggaggtggaggttgcagtgagccgagatcacaccattgcattccagtctgggcaacagagtgagactgtttaaaaaaaaaaaaaagaaagagaaaataaacaaagagttgtagaaatgttatgataaggcagcactggattctgtggaagcacttttttttttgagacagagtcttgctgtgtctcccagactgaagtgaagtggcatgatctcagctcactgcagatctctgcctcctgagctcaagtgatcctcccacctcaccttagcctcccgagtagctgggaccacaggcatgcaccaccatacctggctaattttttgtatttttagtaggaggacggggttttgctatgttgcccaggctggtctcgaactcctgagctcaagtgatccacgcacctcggcctcccaaagtactgggattacaggcatgagccaccgtgcccagcctaagaggtttaaaacaagcggttgatgaaataagacaaaccaagataatatttttttgttatcggtatataaaggtagagaatgtctccggaaaaaggaagtgtaggtggtcaaccttgtcatttaagaggagaactgaagaggctgggcgcggtggctcatgcctgtaatcccagcactttgggaggccgaggcgggtggatcgcttcagcccaggagttggagaccagcctgggcaacatggcaaaaccccgtctctactaaaaacacaaaaattagccaggcatggtggcacgtgcctgtaatcccagctactcaggaggctgaggcaagagaatctcttggacgtggaggttgcagtgagccaagatcatgccactgcactccagcctcagcaacagtgtgagacttggtttcaattaaaaaaaaaaaaagaatctggccatcagggtgaggaaaatgaagtcatggtagctgctgttggagacaatatcaggtggagagaaggctcctatttaaacataggagaggcctaaacctagaaaatatgtgagaacgtaggcatccagacatttttgaggtccatattttagtgtcctggtaccatgtcagtgctgctgcgtgtttaagaaccttgatcctgcacctgaatgtaacatactggttactcttcagggttagggttcttactgagtcagagaaaaataccctacctgaggggctgataaagtagctttggacaggaattccgaaaatgcttgactggcttggaggcaggttacaaagaaattcataattcatttagttgacttcattattcatttagctgaattctttttttttttttttttttttttttgaggcagagtctcattttgtcacccaggctggagtgcagtggtgctgtcttggcttactgcaacctccaccttctgggttcaagcgattctcctgcctcagcctcctgagtagctgggattatgggcgcgcaccaccatgccaggctaatttttgtatttttagccgagacaaggtttcaccatgttggccaggctgctctcgaactcctgacctcaggtgacctgcccgccttggcctctcaaagtggtgggattacaggcgtgggccactgcgcccggcccatttaattgaattctaattcaactaaatgaagtagaattggttatgaaattagttacaaaatttatttagttatgaaatttataattcattcattcattgataaccaccttatctctgagatttggtggttacatggtgctgtcctggatatacagtattttcatattaatacattttgctgtgctkcctttttaggaaactcgaaggaaggaaggcattgtaaagctgaaacctcatgaggaacctcttcgttctgagatcctcagtggaaaattcaccatcttagtgagtgtttagggacctatcttgtagggccttattacttccttttttaactggtgtcctgtttggactttgtttttttttttttttttttaattttattattattatactttaagttttagggtacatgtgcacaacgtgcaggtttgttacatatgtatacatgtgccttgttggtgtgctgcacccattaactcgtcatttagcattaggtatatctcttaatgctatccctcctccatccccccctgtttggactttgttcctatataccttatcctgaatctagagagtctccacagttaggagcagatgtgaaacagccatgcagtttggtataaaattattttagtaacaattgaattactaatagtttctagtaattagagttactaatgataattgaataattgaattatggaaaatcagttgtacagtagacttagaaaagtttcttcagttggtccattaaggttagtcatggtctttgggagagatatgcaatgtgtcagacacccatgcttccatatttaacgcaagctctccacttagttgagacctcagcctttcaagtaaacatacaatggcacttttaaggcagagggtggaaatcatggtcctgttccctggttctctcctgctgcttgtttcttttgccattctgccagggaagttagctaggaagccagtgcacagccatcctttgatctgtctgtagttgaagagcaaagagaatgtgttttttttttcttaccacagaaatatggtccagggagtcctgggagaatcagrcaaaggatgatattaacactcttccctttggacagcaattggtgaagtcagggaattattgttagcatctgttttctacatgtatcaaacccttatccagtatataagtcttagtaattgctgtgattttctatttgatttttttaatgtttcttgttttatttgctttagaatgttcgggacccaacaggagcctccattgccctctttactgccaggttgcatcatccccacaagtcagtccaacatgtggtacttcaggctctgttttacttgctagacagagctgtggataggtaagcattgagattattttttaggtattctacatgcaggtaggaaagtgacagttttttacttgattaaattcagcagtgccttcgccattctcctaggatgtgccctgggcaatgctatgaatagaaaacaatccatgtcctttagaactcggcatgtttgcaggcactatcaagatggtgggcgttctctttaccaccttggctctatgtcaggaaaacagaagctgagaaagtcaattatcggcaatcttcagtgtatggaaaactacttattggaaaagaatgagggggagatgacctgtgctggttctttttgctcatatcagaacctctaaggcctcagtttctttgtctgcataacaggaataatgccgtttagttcagaggattttgagactcaacattcaggggagggctgggtgcagtggctcacacctgtaatcccagcactttgggaggctgaagcaggtggattgcttgaagccaggagttgagaccagcctggacaacatggtgaaaccctgtctctgataaaaaatacaaaaaattagctgggtgtggtagcgtgcacctttagtcccagcttcttgggggaggtgggggaggttgctgaggtgggaggatcacttgagcccagaatggtgaagctgtagtgagccatgatcacgccactgcattccagcctgggtgacacagcaagacctgtctcaaaaaaaaccccacaaaaaagcccacacaaaacaaacaacaacaayaaaaaaacattcagggagaagcccagaagtawaaagttaagcaaaaaccatccttaataaaaagaggtgcataagcataaagaaccagctcaggtcatcactctcttcctgctaaggtaattggtattgttacaattcaattgacaattaaactcaagccccaagaagttttttacagtcatcatatgttagtccagctggttctaagatcctggtttcttcactcttgggcagagttatttctgtcctcccatgctgttgttctgctattcctttttcccctggtgcttgtaatttacagtttcttactgctnnnnnnnnnnnnnnnnnnnnnnnnnnnnnnnnnnnnnnnnnnnnnnnnnnnnnnnnnnnnnnnnnnnnnnnnnnnnnnnnnnnnnnnnnnnnnnnnnnnnnnnnnnnnnnnnnnnnnnnnnnnnnnnnnnnnnnnnnnnnnnnnnnnnnnnnnnnnnnnnnnnnnnnnnnnnnnnnnnnnnnnnnnnnnnnnnnnnnnnnnnnnnnnnnnnnnnnnnnnnnnnnnnnnnnnnnnnnnnnnnnnnnnnnnnnnnnnnnnnnnnnnnnnnnnnnnnnnnnnnnnnnnnnnnnnnnnnnnnnnnnnnnnnnnnnnnnnnnnnnnnnnnnnnnnnnnnnnnnnnnnnnnnnnnnnnnnnnnnnnnnnnnnnnnnnnnnnnnnnnnnnnnnnnnnnnnnnnnnnnnnnnnnnnnnnnnnnnnnnnnnnnnnnnnnnnnnnnnnnnnnnnnnnnnnnnnnnnnnnnnnnnnnnnnnnnnnnnnnnnnnnnnnnnnnnnnnnnnnnnnnnnnnnnnnnnnnnnnnnnnnnnnnnnnnnnnnnnnnnnnnnnnnnnnnnnnnnnnnnnnnnnnnnnnnnnnnnnnnnnnnnnnnnnnnnnnnnnnnnnnnnnnnnnnnnnnnnnnnnnnnnnnnnnnnnnnnnnnnnnnnnnnnnnnnnnnnnnnnnnnnnnnnnnnnnnnnnnnnnnnnnnnnnnnnnnnnnnnnnnnnnnnnnnnnnnnnnnnnnnnnnnnnnnnnnnnnnnnnnnnnnnnnnnnnnnnnnnnnnnnnnnnnnnnnnnnnnnnnnnnnnnnnnnnnnnnnnnnnnnnnnnnnnnnnnnnnnnnnnnnnnnnnnnnnnnnnnnnnnnnnnnnnnnnnnnnnnnnnnnnnnnnnnnnnnnnnnnnnnnnnnnnnnnnnnnnnnnnnnnnnnnnnnnnnttgggaggccaggtgagaggatcgcttgagcccagaagttcgagaccagcctgggcaacatagcaaggcctcgtctctacaaaaagtttaaaaattaggcagccaggcatggtggtatttgcctgtagtcccagacactcacggaaggctgaactgggaggatcacctgagccctgggaggatcacctgagccctgggaggatcatctgagccctgggaggtcgaggctacagtgcgccatgattgtgccactgcactacagcatgggcaacagagtaaaatgctgtcttaaaaatatatytattctggtggctcacgcgtgtagtcccagcactttgggagtccaagggggtggatctcctgaggtcgggagtttgagaccagcctggccaacatggtgaaaccccgtctctagtaaaaatacaaaaaattagccaggcgtggtggtgggtgcctgtaatcctagctactcgagaggctgaggcaggagaatcacttgaacttgggcggaggttgcagtgagcagagatcgcactattgcacttcagcctgggcaacaaaagcraactctgtctcaaaaaaaaaaaagtatatgtatatatatacacacatatataaacacacacacatctatctatctatctatctatctatctatctatctatctatctatctattctataccctaaagtgtgaaaatcttactgcattcatgttttatgtgccttcacaggatgagcactttgatctgggaatatagaacctggatcattcattatgcatccaagcttctttttttttaaattctctttgccccctcactgacttgtttttgttttagtcccctgccacaacctggagtcatgaggggaaagcccataatttgaatttgacccttgaggagctcatggagaaatagaaagtatctagatctggatagcctattcaataattgtgccacacattttctttgtttctttttatttaagagacagrgtctcacttttgctcgggctgaagtgcagttgcatcatcataactcacagcagcctcaactcctgggctcaaatgatcctcctgcctctgtctcccaaggagctgggaccacaggcacgtactaataaacccgtccaattttaaaatttttttgtagaggcggagtttcactctgttgaccaggctggtctcgaacttctggcctcaagcagtcttcacatctcagtctcccaaagtgctgagattacaggtgtgagtcactggacctgtcctgtgccacacattttaacagcatcttggacctttgtggatcatagtctctctggggttgtgaaaaaggagtcaagggcagggcgcagtgactcacacctgtaatcccagcactttgggaggccgaggggggcagatcacttgaggtcaggagtttgagaccagcctgggccacataatgaaaccccatctctactaaaaattaaaaaataagtaaagaaataaataagaaaaaggagtaaagatttaacactaatgtaacacattaggtgccagttgaaactaagtctgctggagaaactttcatgtacctcagaattagacatttttgaaatgttagctcatgggcgggtgcttctgccttggaatttgttaaagggatgaagatatggaggttcccaggaggtgctggtgcaaaaatagtaagatacaaaataacttgaggctgggcatagtggctcacgcctgtaatcccagcacttgggaggccgacgtgggtggatcacctgaggtcaggagttcgagaccagcctggccaannnnnnnnnnnnnnnnnnnnnnnnnnnnnnnnnnnnnnnnnnnnnnnnnnnnnnnnnnnnnnnnnnnnnnnnnnnnnnnnnnnnnnnnnnnnnnnnnnnnnnnnnnnnnnnnnnnnnnnnnnnnnnnnnnnnnnnnnnnnnnnnnnnnnnnnnnnnnnnnnnnnnnnnnnnnnnnnnnnnnnnnnnnnnntaatttatcctaatgaccatttgggtctgcagatcacatataagtacggatctggcttggtggaagagtacatctttgagaaatctttataaatctgggaaattggactgaggaatactttctgtatcttcaaatgttcctcagtttggtctgggaataggcttactttttttttttttttccccctgagatggagtctcgctctgttgcccaggctggagtgcagtggtgcaatctcgattcactgcaacctctgcctcttgggctcaggcaattctcctgcctcagcctcccaagtagytgggattacaggcatgtgccaccatacccagctaattttgtatttttagtagaaatggggcttcaccatattggccaggctggtctcaaactgctgacctcaggtgatccacctgcttcagcctcccaaagtgctgggattataggtgtgagccaccacacccagccatggcttactattaatacctgttaatctacttttttttctttcttttccctctttttttttttttttttaaatagagtcagggtcttgccatgttgcccagactggtcttgaactcctgggttcaagcgatccagctgccttggcctcccaaagtgctaggattacaggcgtgagccactgcgcccagtcttactttttcttaagacaagatctcacactgtctcccaggctggagtgcagtggcatgacctccctgtagcctcgacctcctgggctcaagtgaccctcccacctgagcctcccaagtagctgagactataggtcactacatgatgaggtattgtcatgttgcccagcctggtctcaaattcctgggcttaagctatccaccatccttagcctcccaaagtactgagactacagtcatgaaccactatgtcagccttaatctactttttaggaatgctttccaaaggccatttatgggtttgttctcttcctccatggggtcataagagacaaatttactatcaatgagcttagaggcagttttgttctacacagtttttcacaggtctgaaatattttcttagagatgggcttccagtctactgaattacaattcagtgaccatttatttttaagggctgtgctagggattgttgggcgtaaygagtggaacaacaagttcttgtcctttaggagagaatcagatggctatacagagtttattaaggccacaagaaaaatccacagaaagatttatggggctttaagggaaaaaacaattggtagcatgtttgattacagttatcagggaaactttcatggaagaggaaactttggggttgagtacggaatatgttatatgatttgggtaggtagattcagaggggtgggagaaaacagttcagattttgataacttagttgctgtagagcattctcaacctacgagtttggcatttggtacatctggataaatctgccttaataaacatagcagataccaaagataagagatctttttgtaagaccagtgtgcagtcaggcagttgttttgatcctagatgtgtctcatactctcaggttttgttttggcattaggctttcaacctgcctcatccatctgcttacttacaaatgtttttgttcaatggttgatttacagctttgaaactcagaggaatggactggtgtttatctatgacatgtgtggttctaattatgccaactttgagctggatcttggcaagaaagtcctaaacctgctgaaggtaaggctatggagggccctctcaagtttccttcaatgcttgggatatatatatttttttaattctttgggaaaagatttaggaaagatgcaaacttcagacattatgttcaatgtaaaggtcatctgtaaatgatgactactctctgcttccttagaacaagaaatgatcttaaaagtgaaatgggaggaattcgggtaaaaaatgcacaggaacggccaggcgccatggctcatgcctgtaatcccagcactttgggaggccgaggtgggtggatcatgaggtcaagagatcaagaccatcctggccaacatggtgaaaccctgtctctactaaaaacacaaaaattagctgggtgtggtggcgcgtgcctatagtcccaggtactcgggaggctgaggcaggagaatcgctcgaacctgggaggcagaggttgcagtgagccgggattgtgccactgcactccagcctggcgacagagcgagactgtgtctcaaaaaaaaaaaaaaaaaaaaaagcacaggaacattctgagtcataaaagtgggatgggctgggtgccatgactcacgcctgtaatcccagcactttgggaatctgaggcatacttatgtgtataaggtgtgtrtgaaacatacataaatttaggccaggcatggtggcttacaccagtaatctcagcactttgggaggctgaggcggacggatcacgaggtcaggagatcaagcaccatcttggctaacatggtgaaaccctgtctctactaaaaatacaaaaaaaaaaaaaaattagccgggcctggtggcagacgcctgtagtcccagctacttgggaggctgaggcaggagaatggtgtgaagccgggaggtggagcttgcagtgagccaagatcgtgccactgcactccagcctgggcgacacagtgagacttcgtctcaaaaaaaaaaaaaaaaaagaagaaacatacataaatttcctgcttagacttgggtcccatccccaagatatctaattatgtatatgcagatattctaaaatctgaaaaaaattcaaaatctgaaacacttctagtcccaagcattttggataaggaatacccaacctgtgttatgaatggtgctgttatgaacattcttaaacatgttttctggtgcatatgtgtaagagggtctctaggggagtgtttctcaaccttttttcattgttgcctcactaaggagcctttttaaatattttttcccctaataattcctcttctaatgaaattttaataccataaacatactgcatatctctatgtactctttaaaatttattttttattttattttgttttattttattttatttttatgttttttgagatggagtcttgctcttgtcgcccaggctggagtgcggtggcgcgatgtcggctcactgcaacctccacctcccggttcaaatgattctcctgcctcagcctcctgaatagctgggattataggcgcctgccaccccgcccggccaatttttgtacttttggtagagacggggtttctccacgttggccaggctggtctcaaactcctgacctggggtgatccacccgcctcggcctcccaaagtgctgggattacaggcgtgagccactgcgcctggccttattttttaaatagagacagagtctcgctatgttgcccaggctggtcttgaattcctgggctcaagcagtaccgcctccttggcctcccaaagtgttgggattataggtgttggccactgtgcctggcctctttatgtactctgtatacataaaaagtgtaagatttctttttttttttttttttttttgagacggagtctcgcactgtcgcccaggctagagtgcagtggcacgatctcggctcactgcaagctccgcctcccrggttcacgccgttctcctgcctcagcctccagagtagttgggactacggcgcccaccaccacgcccggctaatttttttgtattttaagtagagacggggtttcaccatgttagccaagatggtctcgatctcctcaccttgtgaactgcccgcctcagcctcccaaagtgctgggattacaggcgtgagccactgcacctggcccgatttcttttttttattctggctcacctcaccctgctctcctactaattttacccctttggtgaggtgatatctcccccattgagaatgcatgctctagggtatacacttaggagtagattgttgggtcctaaagtctgtgaagatttaactttataagacaatgtcaaactgtgtttcaaagcagtcgtacccccttgccatgtgtgaagatttccattgatctacatcctctccagcacttactaatgtcagacttcttaatttttttcccaatcaaatggatatgagatggtatcttgtggtatagcttgcgtttcttttattagtgaaattaactatatcttcatatattcgttagctatatattttttcttcttctgtgaaatgtctatttatgatttgtccatttagaaattaatagtttttaatatattattctaatccatgaagatacatatatacacacacacatataatgtgtgcgcacagtaaactgtctcttaatttatagcttgttttttcactttttatgaagctctttgactaacagaagttccttttttttaagaccaggtcttgctctgttgccaaggctgagtgcagtggcacgatcttggctcactgcaacctccacctcctgggttcaagcagttctcatgcctcaacctcccaagtagctagaattacaggcatgtgccaccacacccaactgatttttgtatcttttgtagagatggagtttcaccatggtgcctaggctggtctcaagctcctgagctcaagcaatccagccaccttggcctcccaaagtgctgggattacaggcgtgaaccactgtgcccgacccacagcgcttagtttcatgcagtttttcaatattccggcccttttcatgggtgtggttaccatgcaacactggcggtctaactaggaagaaatcattcctgagaaatccaaaagaaaaaaaaaaaaagaggaattgtagctagtatcttctagcctattctttttgccacttttctttctttttttttttttttttgagacagagtgtttcactcttttgcccaggatgcagtgcagtggtgctatctcggctcactgcaacctccgcctcccaggttcaagcgattctcctgccttaatttcccaagtagttgggattacaggtgctcgtcaccacacctagctaatttttgtatttttagtggagatggggttttgccatgttggccaggctagactctaactcctgacctcaggtgatccactagccttggcttcccagagtgctaggattaaagacgtgagccaccgtgcccagccctttttgccactttcaaaagactgattcttttttgttgtttgtttgttttgagatggagtctctctctgtcccccaggctgaagcgcaatggcctgatctcagctcactgcagcctccgcctcccgggttcaagtgattctcctgcctcagcctcccaagcagctgggattacaggtgctcatcaccacactcggctaatttttgtatttttagtagcaatggggtttcaccatgttggccaggctggtctcgaactcctgacctcaagtgatccatccaccttggcctctcaaagtcctgggattacaggtgtgatccaccacgcccagcctcaaaagactgattctcaatctgacatgtcactctgttctcttcagttaccctttagttctactgatttggagaaaccccagcactcctctatggagaatatacagcatctagaacaaacttctccaaaggcctcttcactgaagtgtgataaactactttcatcttttccttcaaagatgcaacaatttatttcaggacctaaatgtccaaggtccttttaccagcaaatcaaaaaccattctaggaaaacacctgttatttccacaaaatgataaataaaaagtagaagctattacgtctcttttttcagagcaaagaactgcagacctgggcctagtctatttacatgactgtctgggggtacctgctgcagtcaccagggatgggtggcagcttggtcagcagcgaatagcctgcagcattctcctgtggttataaaggatttacccctcaatcccaaacctttcctcaagggattaacagaaaagccagtgacagtgaaacttaagtggcgaatggattacaaaggctaactggtatctgtagatgaaccagatctacagatgtatctataagaacatgtagcttgcaaatacagaagaatacatagttggggtattgtctggacatctggatgaagttttactaaagtataataatgtcctttgtctcagaggtgtggaagaggaagaggatggggaaatgagagaatagcgtcttttctgggggattttaaaaatatatatttctagacaataaagatttgtttgtttttcaaataaataaatgactgtatagcaccctcatatactgtcagttcagtaagtcgttaacaccttttggaaggcatctggcattataaatccttaaaaatgcacataccctttgatcagttgtatttctgagattatatgctaaggaaacaatcaggaaaatataaaaagagtatttactgcacatttattttagataattaaaaataataccttaagctggctccagtgacttaaatctataatctcagccctttgggaggctgaggtgggagaattgcctaaggccaggagttcaggaccagtctaggccacgtagcaagaccctgactgtacaaaatttagctgcatgtggtggtgtgtgcctatcatcccagctacccaggaggctgaggcaggaggatcacttgagcccaggatatgaggctgcagtgagctatgatcatatgattgcattccagcccagttgataaaaccctgtcttaaaaaaaaaaaaagaatattcataatctttagccaaataatcccagtcttagaaacagcttcttaaaataatttaaaaggaggccgggtacagtggctcatgcctgtaatcccagcactttgaaaggccaagatgggcggatcacttgaggccaggagttcgagaccagcctggccaacatggtgaaaacccatctctgctaaaaatacaaaaaagttagccaggcgtgatggcacacgcccgtaatcccagctactcgggaggctgaagcaggagaattggttgaacccttgagcagatatcgtgccactacactccagcttgggtgaccaagtgagactaaaaaaaaaaaaatattaaagtgagtctcaaaaaaaaaattaaaaggaaaagataaaatgagcatatcaggattatttaggcctgaaaacaaactgaataatcagaatgatggttacatggttaattaaattacctatgtcatatttattccccaggatattgtgactttgttaaaactgacaaatagaaagtctaagttggggaaagacgggactttttaatatgtaaaggtggaaaacaaaacagctacccatatagaaaaaaatgtcagattcctacatctcataccatgttcaaaaatcaacttcagataggttaaagtcttaaatagcaaaaacaggccaggcatggaggctcacacctggaatcccaacactgggaggccaaggcaggcagattgcttgaacccagtagtttgaaaccagcctgggcaacacgatgaaaccatttgtatttttattctacaaaaatacaaaattagacaggcatggtggcacatgctacttgcgaggctgaggtaggaggatcacttgagcctgggtggtcaaggctacagtgagccatgatggtgccatcgtactccagcctgggcaacagagtgagaacttgtctcaaaaaaaaaggacaaaaacaaaagtttaaatttttaaaagaaaatagctcctcaaatgtggacaagtggaaacaatgtggaaaatagctcctcaaatctggacaagtggaaacaaccaatgtgtacaagtggaaacaacccaaatgtccatcaacggattaatagataagaaaaatgtggtatatttatgaggaaatattattcagccttagaaagcaatgtaattctgagacatgctacaatatggattaaccttgaaaacattatgctaagtaggataaacaagacaaaaaaggacaaatatagtaggattccaataatacgaggacctaaaataggcaaattcatagagacagaaagtagaaccaaggttactagggactagggggagaagggaatagggagatgttrtttaatgggtacagggtttttgtttgtgatgatgaaatagttctgaaaatgaatagtggtgatggctgcattgtgaacatacttaacgccaataattgtacacttaaaatggtttaaaaggtcaattttgttgtgtatattttacaataaaaaaccaaattagaaaaattaatacacattggtggaatcggtggtacagcagtaaaaaaaaaaaaaagtactttttctgacattaaaatagaaaaggatttaagacacacaacacactaaccagaaaagaaaacagtaatacatttaaccatttgaaaattaagaacttcacgccaggagcagtggctcaatgcctataatcccagcactctgggatgccaaggtaggaggatcacttgagatcaggagttcgaaaccagccggccaacatggtgaaaccctgtctctactaaaaatacaaaaattagccaagtgtagtggcgcagtcccagttacttgggagcctgaggtgggaggatcatttgagcctgggaggtacaggactcagtgagtggcgattgtgccactgcactccagcctgggcaacagcaagatcctgtctcaaaaacaatacaaaacaaaaacagagcagccaagcaaacaaaaaaactaagcactgtggattaggaatgaatgattttttcatctttatatcttgtgtggatgaggatatctcctttttttagatctcatttgccatagtgcacattagattattgattggtaaatacatagatgaatgaatagattaaaaaaagattatgcatacatcagactgaatgaaaagttatgaaagagaaatttttaaaatttttaaatttttatttattattgttaaaattttgagatggagtttcgctcttgtcgcccaggctggagtgcagtggtgcgatcttggcttactgcaacctccacttcctgggttcaagcgattctcctgccttagcctcccgagtagcagggattacaggcacatgccaccatgcccggctaatctttgtatttttagtagagayggggtttcaccatgttggccaggctggtctcaaactcctgacatcaagtgatctgcccgcctcagcttccagaagtgctgggattacaggcgtgagccactgtgcccagccatattattttttttgagacagagtttcactcttgttgcccagggtaaagtgcaatggcttgatctcaactcactgcagcctctgcttcctgggttcaagtgattctcctacctcagccttctgagtagttgggattacaggtgtctgccaccgtgcctggctaattttgtatttttagtagtgatgggttttaccatgttggccaggctggtcttgaactcccaacctctggtgatccacccacctcggcctcccataatgctgggattataggcatgagccaccgcacctggtcgagaaatgtttaatgttcagtttattcatgatctcatttttccttcaagttttaataacataacttttttaagaggcatatatgtatgctgatgtgtggtatgtgtaggatatctgttgagatgagaagtcagaatagtttttgatccataaagcttacggtagacaagaacttaacattgttatttttaaaggtaaatcagcttctaatttcttcagtttgtttaaccacttttcctctagctgctgagatcaaacctgaattaggctgtagactccccctgctgggtaagaatggggagaagagcagaaaacctaaacttgggcttgaagagtcacaggttccattacacttaaatcctcatgtgttttctccacagggagcatttccagctcgtttgaagaaggtgctgattgtgggggcacccatatggttccgagtgccctattccatcatcagtctcctcctgaaggacaaagtccgggagagggtaaggcaagcttgcccttttttatctggaggtgaatagatacagtgaattcctgccaattaattttctaccttcaaaaaatcctcctggcgtgtcttctagagcctgttctgcttctgttagtgcattcacttatattctctacctgatgcattagtcagttcaatacagactgcctctcttactgtcctacgagcttcttgaagttcaaaactaaacacagtttatctggttctcactttctatagcaccttgcataagatagtactgaaggaacgtgtcctggaggtaacttagggatagctgctacttccaaaatttatcctagtgctgcataggcctttaatatttaacagcttgtaatataactgcattagttgaactggcattagaatttgttcaactggaaacatcattcaatcccttgaccaccagggttgtggaggaaagtttttcgttatgtctctttctacatttattcctggcatttttttttctcagaataccttgttgcttcccaatttcaaaagcgttcaaaattactttaattctgggccaagtgtaatggctcatgcttataatactaacactttgggagtccgaggccaaggcgggaagatcgcttgaggccaggagtttgagaccagcctaggcaacacagtgagaccccgccgccacaataaaaccagaaactttaattctgttataatctcctgcgtgttccatgattaaaagatttatggtctcagttactgattgcagcaattaaaagacaggacatgaaagtgaaaacatttggttctgtggaagctgcttagagacctaatgacgcagagtaggagagagcttttctttttttttttttttttttttttttgagagtgtctcactctgttgcctaggctggagtgcagtggcacgatcttggctcactgcagccccgcctcctgagttcaagcgattcttctgcctcagcctcctgagtagctgggagtacaggcgcacgctaccacacccagctaatttttgtatttttagtagagacggtgtttcaccatattggccaggctggtctcgaactcctgacctcatgatccgcccacctcagcctcccaaagtgctgggattacaagcgtgagccaccttttttgagacggagtctcgctctgtctcccaggctggagtgcagtgaagcgatctcggctcactgcaagctccgcctcccaggttcaaaccattctcctgcctcagcctccctagtagctgggactacaggcgtgtgctgtcacgcccggctaattttttgtgtttttagtagagacggagtttcactgtgttagccaggatggtcttgatcttctgacctcgtgatccacccacctcagcctcccaaaagtgctgggattacaggcataagccaccgtgcccagccaggagagatcttttctttctttttttttttttttttttgcgacagagttttgctgttgtcgctgaggctagagtgcaatggcatgatcttggctcactgcaacctccgtcccccgggttcaagtgattctcctgcctcagcctcccaagtagctgggattacaggctcctgccaacatgcccagctaattcttgtatttttttagtagagatggggtttcaccatgttggacaggctggtctcaaactcctgacctcaggtgatccacctgcctcagcctcccaaagtgctgggattataggcatgagccaccgtgccagctggagagatcttttctaaggtaactctttgagaggaatccataggcaagttcttgcacttgaattataggaattatacatgcatgtataaactcaaaatatattaagcactttttgtagtcgaagcactggttcctgataattaaaaattaagtgagacagtctaccctcaaggagctcatggtcttgatagggaacayagagatacacataggaggactttggctctgcaggaacgcagaggagcatatggcctcaggcagtcaggaaagacttcacagaagaggtgagctgtgctggtccatgaagaggcagaggaggaaaggaaggcattccaagaagaggcgacagcaaaagagatgagcttttaggaggaagagaatccccattccacagagatcctaaggagaaccagttaagctaattagttccagcatggctatgtccaagcagagagcagaattaagttttatggttactacaaaaaattagctgggcgtggttgtgtgcatctgtattcccagctacttgaggggctgaggtggaaggatcacttgagcccaggaggttgaggctgcagtgagccttcatcacgccactacactccaggctgggtgaaaaagtgagaccctgtctcaaaaaaaaagtgttatctcacatttttcctgggctaccctgcctctgggtgtcttgctttcatagaatcctatctttgtgaacagttataccaagctgagtaaaatacaagctaacaggccttagaattggttgtctgagtatggggttgacaaaaataactactacctatgcattcttagtggccaaaaaaagagtaccagcatgcagcgatgctgggaagccttgttaataatataaagcttttgttcactacatcgtcctttcagaagatgtataacagtgtccctaattccaggagtgaattttatatacattctgggagttcacacttttatctggcaaattcataggacttaaatctcaggcagatgaaatgtagtctactacttttacaagtataccttgtatttcaagaaaatcttatcccatcctccaaacctgatataaatacatttattctttgtcactctatatgcctttccctcctcccacatactcacatggttctttctaaccttccagattcaaatattaaagacatctgaggtcacgcagcatctgcccaggggagtgtcttccagaaaacctgggtgggtacgtcaaaattgatctcgccacttggaatttccagttcctaccccaggtgaacggccacccagatcccttcgatgagatcatcctgttctccctccctcctgccttagactgggactcagtacatgttccaggtccccatgctatgaccatccaagagttggtggactatgttaatgccaggcaaaagcaaggaatctatgaggaatatgaagacattcgtcgtgagaaccctgttggcactttccactgttccatgtaagtnnnnnnnnnnnnnnnnnnnnnnnnnnnnnnnnnnnnnnnnnnnnnnnnnnnnnnnnnnnnnnnnnnnnnnnnnnnnnnnnnnnnnnnnnnnnnnnnnnnnnnnnnnnnnnnnnnnnnnnnnnnnnnnnnnnnnnnnnnnnnnnnnnnnnnnnnnnnnnnnnnnnnnnnnnnnnnnnnnnnnnnnnnnnnnnnnnnnnnnnnnnnnnnnnnnnnnnnnnnnnnnnnnnnnnnnnnnnnnnnnnnnnnnnnnnnnnnnnnnnnnnnnnnnnnnnnnnnnnnnnnnnnnnnnnnnnnnnnnnnnnnnnnnnnnnnnnnnnnnnnnnnnnnnnnnnnnnnnnnnnnnnnnnnnnnnnnnnnnnnnnnnnnnnnnnnnnnnnnnnnnnnnnnnnnnnnnnnnnnnnnnnnnnnnnnnnnnnnnnnnnnnnnnnnnnnnnnnnnnnnnnnnnnnnnnnnnnnnnnnnnnnnnnnnnnnnnnnnnnnnnnnnnnnnnnnnnnnnnnnnnnnnnnnnnnnnnnnnnnnnnnnnnnnnnnnnnnnnnnnnnnnnnnnnnnnnnnnnnnnnnnnnnnnnnnnnnnnnnnnnnnnnnnnnnnnnnnnnnnnnnnnnnnnnnnnnnnnnnnnnnnnnnnnnnnnnnnnnnnnnnnnnnnnnnnnnnnnnnnnnnnnnnnnnnnnnnnnnnnnnnnnnnnnnnnnnnnnnnnnnnnnnnnnnnnnnnnnnnnnnnnnnnnnnnnnnnnnnnnnnnnnnnnnnnnnnnnnnnnnnnnnnnnnnnnnnnnnnnnnnnnnnnnnnnnnnnnnnnnnnnnnnnnnnnnnnnnnnnnnnnnnnnnnnnnnnnnnnnnnnnnnnnnnnnnnnnnnnnnnnnnnnnnnnnnnnnnnnnnnnnnnnnnnnnnnnnnnnnnnnnnnnnnnnnnnnnnnnnnnnnnnnnnnnnnnnnnnnnnnnnnnnnnnnnnnnnnnnnnnnnnnnnnnnnnnnnnnnnnnnnnnnnnnnnnnnnnnnnnnnnnnnnnnnnnnnnnnnnnnnnnnnnnnnnnnnnnnnnnnnnnnnnnnnnnnnnnnnnnnnnnnnnnnnnnnnnnnnnnnnnnnnnnnnnnnnnnnnnnnnnnnnnnnnnnnnnnnnnnnnnnnnnnnnnnnnnnnnnnnnnnnnnnnnnnnnnnnnnnnnnnnnnnnnnnnnnnnnnnnnnnnnnnnnnnnnnnnnnnnnnnnnnnnnnnnnnnnnnnnnnnnnnnnnnnnnnnnnnnnnnnnnnnnnnnnnnnnnnnnnnnnnnnnnnnnnnnnnnnnnnnnnnnnnnnnnnnnnnnnnnnnnnnnnnnnnnnnnnnnnnnnnnnnnnnnnnnnnnnnnnnnnnnnnnnnnnnnnnnnnnnnnnnnnnnnnnnnnnnnnnnnnnnnnnnnnnnnnnnnnnnnnnnnnnnnnnnnnnnnnnnnnnnnnnnnnnnnnnnnnnnnnnnnnnnnnnnnnnnnnnnnnnnnnnnnnnnnnnnnnnnnnnnnnnnnnnnnnnnnnnnnnnnnnnnnnnnnnnnnnnnnnnnnnnnnnnnnnnnnnnnnnnnnnnnnnnnnnnnnnnnnnnnnnnnnnnnnnnnnnnnnnnnnnnnnnnnnnnnnnnnnnnnnnnnnnnnnnnnnnnnnnnnnnnnnnnnnnnnnnnnnnnnnnnnnnnnnnnnnnnnnnnnnnnnnnnnnnnnnnnnnnnnnnnnnnnnnnnnnnnnnnnnnnnnnnnnnnnnnnnnnnnnnnnnnnnnnnnnnnnnnnnnnnnnnnnnnnnnnnnnnnnnnnnnnnnnnnnnnnnnnnnnnnnnnnnnnnnnnnnnnnnnnnnnnnnnnnnnnnnnnnnnnnnnnnnnnnnnnnnnnnnnnnnnnnnnnnnnnnnnnnnnnnnnnnnnnnnnnnnnnnnnnnnnnnnnnnnnnnnnnnnnnnnnnnnnnnnnnnnnnnnnnnnnnnnnnnnnnnnnnnnnnnnnnnnnnnnnnnnnnnnnnnnnnnnnnnnnnnnnnnnnnnnnnnnnnnnnnnnnnnnnnnnnnnnnnnnnnnnnnnnnnnnnnnnnnnnnnnnnnnnnnnnnnnnnnnnnnnnnnnnnnnnnnnnnnnnnnnnnnnnnnnnnnnnnnnnnnnnnnnnnnnnnnnnnnnnnnnnnnnnnnnnnnnnnnnnnnnnnnnnnnnnnnnnnnnnnnnnnnnnnnnnnnnnnnnnnnnnnnnnnnnnnnnnnnnnnnnnnnnnnnnnnnnnnnnnnnnnnnnnnnnnnnnnnnnnnnnnnnnnnnnnnnnnnnnnnnnnnnnnnnnnnnnnnnnnnnnnnnnnnnnnnnnnnnnnnnnnnnnnnnnnnnnnnnnnnnnnnnnnnnnnnnnnnnnnnnnnnnnnnnnnnnnnnnnnnnnnnnnnnnnnnnnnnnnnnnnnnnnnnnnnnnnnnnnnnnnnnnnnnnnnnnnnnnnnnnnnnnnnnnnnnnnnnnnnnnnnnnnnnnnnnnnnnnnnnnnnnnnnnnnnnnnnnnnnnnnnnnnnnnnnnnnnnnnnnnnnnnnnnnnnnnnnnnnnnnnnnnnnnnnnnnnnnnnnnnnnnnnnnnnnnnnnnnnnnnnnnnnnnnnnnnnnnnnnnnnnnnnnnnnnnnnnnnnnnnnnnnnnnnnctgccgggaagaggcgctcctcacttcctagatgggatggcggccgggcagagacgctcctcactttccagactgggcagccaggcagaggggctcctcacgtcccagacgatgggcggccaggcagagacgctcctcacttcccagacggggtggtggccgggcagaggctgcaatctcggcactttgggaggccaaggcaggcggctgggagatggaggttgtagtgagctgagatcacgccactgcactccagcctgggcaccattgggtgcttcttgctaacatcctatgctctgaaatttctgaaggtctttggtaccaacaggataaccctgttggacatatttttggatatttttctgaaatgcaagttttttttaaaaaaagtaggttcaaaataggctactctctattccagtactcagtgtgagtgctggtctgttcatttgggcagtttctccccataacatttatggtataacattacttcttgaggaggggtatgtggtacacttaaaataatccacagtcagagagtacagttgcctcataggactttaaccccttgagattttcattctactcaaatcctatcacaaaaccatctcgctagtttataactctggctcgtaactagttgataactatatatacatacatacatatatatatacacacccacacacaaattagctgggtgtggtggcgcacacctgtaattccttccttcctccctccctctcttttttttttctttctgagatggagtctcgttctgtcacccaggctggagtgcaatggcacgatctcggctcactgcaacctccgcctcccaggttcaagcgattcttcctgcctcaccctcccaagtagctggaattataggcgcgcaccaccatgcctggctaatttttgtatttttagtagagacagggtttcacgatgttggccaggttgatcttgaactcctgacctcaggtgatctgcctgcctcagcctcccgaagtgctgggattacaggtatgatctaccgcacctggcctctttttcttttttctcttctcttcttttcttcttctcttctccttttcttttcttttatccttttcttttcctcaaattcctaggttaaagcgatcctcctacttcagcctcctgagtagctgggactacaggtatgtgccactatgtccagctcattttttattttttgaagagatggggttttggcatgttgcccaggctggtctcaaactccgaggctcaagtgatcctcctgcctcaacctcccaaagtgttgggattacaggtgtgagccaccgcacctggtcagattatttctcttaccatgttgctgtcatttctcttaccatgttttaattggctgccccagaaatctctttctctccagctagtgagctgtgactgttgaaaactacagaaactagggctgggggcagtggctcatgcctataatcccagcactttgggagtaaaggtataggaggatcatttgtgcccaggagtttgagactaacctgagcagcatagcaagaccctacctctacaaaaataaaaaacgaaaaaattagccaggcatggtggcacactcctgttgtcccagctatgcaggaggatcacttgagcccgggaggtcaagaccacagtgagttatgatcacgccactgagctccagcctaagtgacagagtaagactttgtttaaggaaaaaaaaaaaaaaagaaagaaagaaaagaagaggaaaaaaaaaaaagaaagaaaatgagggaagccatcctagtgggtcccagcctcatattccaacttaaccaaaaattccctctgtgagtgacacaagttatttcccttctcagcactttggttttcctctgtataatatgtgactactggactctgatattcacctacctttgtagcttaaatgttttagaaatctaggattctgtgagtacctcttctctcttgtaactcctgtccagtgtagtcagtgtgttctgaataagatgcagggatagagtcttttagcaaagcaaagagggaaaataatgagttggggaaaataatgagatagggaaagtaagagataagaggcacttgagaaagaagtcaatcagatcaagaatgcaaaggaaaataagaggagaaaaaggggacacagaccatatatcaacaagggaaattattcttttctctcatacagctctgtttcttccctaccagctccagacccctatttttatttaatttttatttcattttacttattgtatttattattttattattattattttttttagagacagggtcttgctctgtcccccagactggcgcatagtggcatgatcatggctcactgcagcctccatctcttgatgctcaattgatcctcctgcctcagcctcttgagtagctgagaccacagacatgcaccaccatgcctggctaattttttaaattttttgtagagtctccctatgttgcccaggctggtcttgaacccctgggctcaagtgatcctcctgcctcagccttccaaagtgctggaattatgggtgctacctatacccaactaccagactccctgtttatatccaatctcttttgcaaacagaacagttattcccttaaagtcttttttgttgttgttgagacagtctcactccatcacccaggctggagtgcaatggtatgatttcggcccactgcaacctccgccttgtgggttcaagccattctgtgccttagtctcccaagtagatggaattacaggtgtgtgccaccacacccaactaatttgtgtgtgtatatatakgtgtgtgtgtgtgtgtgtgtgtgtgtatgtatgtttgtttatttatttatttatttattttgagacagagtctcactctcggccaggctagagtgcagtgccacgatctcagcccactgcaacctccatctcccggctcaagcaattctcctgcctcagcctcctgagtagctgggattacaggcgtgtgccaccacacccggttaattttgtatttttagtagagatggggttwcactgtgttggccaggctggtctcaaactcctgacctcgggtgattcgtcctccttggcttcccaaagtgctaggattacaggcgtgagccaccatgcctggcctaatttgtgtatttttagtagagatggggttttgccatgttggccaggctgatctcgaactcctgacctcaagtgwtctgcccacctcagccctgcaaagtgctgggattacaggcatgagccactatgcccagcctcccttgcagtcttgaatcaaggaaatatgttggagcagggaggcatgctaggctgatctaagaggatgcacacttatcctggggattcttcaccttgctctcggtgcttttgcaactaccagctgctgtgaggcccttgagatgtcatttctactatggagtctcccctcctccattaaaaaagtgggtttggctgggcgcggtggctcacgcctgtaatcgcagcactttgggaggttgaggctggcagatcacgaggtcaagagattgagaacatcctggccaacatggtgaaaccccgtctcttctaataatacaaaaattagctgggtgtggtggcacgcacctgtagtcccagctacttgggaggctgaggcaggagaatcacttgagcccaggaggcggaggttgctgtgagccaagatcatgccaccgcactccagcctgggcgatagagcaagactctgtctcaaaaaaaaaaaaaaaaaaaaaaaagtgggtttagatcgtcttgttgccatcatccaaaccagctaccatttgacaatcagagaacagatctctcatctaatgagaggacttcctagtcttgcctattgaatgactgattccccactttatgatttagaacctagaatcctcatcagctccaagcctctgacttacaccaactcccagtagagctacttacaaagaacaaactgtgtctcccttggaattctggattatgaagtggctatcagtgtatattcactcttgcccaggattcccctggaccaagagactttctttcccttttctctttttactttttcttataattgtagattcacctgcagttgtaagaaataatggagacagattacatgtaccctttctacagttatcccatgrtaacatcttccaaaactatagtgtaatatcacagccagaatgttaatatagatacaatccaccaatctgatttagacttccccagttttacttcatttttgtgtatttagttctgtgcagttttgtcacacatgtaggtttgtgtatctgtcaccataatcaagatacagagttctgtcaccacaaggctcccctcgttgcccttcattatttttattttacacttgatsttagccaaaagactgagaagcgatcaatatttttatttttatttacttatttttttaagacagagtcttgctctgtcacccaagctggagtgctgtggtgcaatctcagctccctgtaacctctgcctcccaggttcaagcgattctcctgcctcagcctcccaagtagctgggattacaggcgtgcaccaccatgcctgacgaatttttgtatttttactacagtcagggtttcaccatgttggccaggctgatctcaaactcctgacctcaggtgatccactcacctcggcctcccaaagtgctgggattacaggtgtgagccaccgtgcccagcctcattgccctatagtaaacatatacctccttcccaccacctccccattcctaacccctgcaaccactaatctattctccatttctctaattttgtcctttccaaattgttgttatatcaagtaacattayataaaatgtaaaaaaattacatacatactgtatgtaatcttttaggattggttttattcactaggcatattcgtataggaagggagaaatatatatatatatttctctgagatgtggtctcgctctgtcgcccaggctggagttcagtggcgtgatctcagctcgctgcaacctccgcctcatgggttcaagtgatctcccgcctcagtctcccaagtagctgggattacaggtgcctgctaccacgcccagctaatttttttttttgtatttttagtaaagatggggtttcaccatattgactaggctggtctccaactcctgacctcaggtgatccgccagcctcagcctcccaaagtgctgggattacaggcatgagccactgcgctgggctgaaattttttaagattttacagacaactatgttcctaccacagaatcaacactgactcttgttaatattttgttatatttgcttcatctttttttttttttttttgagacagagttttgctcttgttgcccaggctggagtgcaatggtgtgacttcagctcactgcaacctccgcctcctgggttcaagcgattctcctgccttagcctcccaagtagctgggattacaggtgcccgctaccaagcccagctaattttttgtatttttcatagagacggggtttcgccatgttggtcagagtggtctcgagctcctcacgtcaggtgatccacccaccttggcctcctaaagtgctggaattacaggcatgagcccccacacctggcctttttctttctttttaagagagacatgtgttcttgctctgtcgcataggttggagtgcaggtgcagtggcactgtcatagcttatggcagccttaacctcctgggctcaagtgattttcttgccttagccttcctagtagctgggacaagaagtatggggtgccacaccttgctaatttttttgaagtttttgtagagatggagtcttgctctgttgcccaggctggtctcaaactcctgggctcaagtgattctcccacctcagcctcccaaagcactaggattttaggcatgagccactgtgcccagctgtctttttaattattatatgagagaaagaatttattataaagttgaaattccttctaatccgcatccttagttctccccactcatcataagcagctactagtatraatatgatatttctttctagttgattttgtttatactgttatatatgcataagcactcatgaacaatatagagtattattttatatgtgtgacctttgtaatttctttgctttcagttaatatatgcaaataatttttttcaaaaccaaacagttctaaagaagacaagcaatgacaaaataaatagcaaattcctattttaccctcagttccattacctataatcatgtattcaactcttgtagctgtttcccctggtatttcatccctaattctaaattaaaatgcttataatatgccaggcacagtggctcatgcctgtaatcccagcactttgggaggctgaggtgggtagatcgtttgagcctaggatttcaagaccagcctgagcaacatgtagagacaggtggaaaccctgtctctacaaaaattacaaaaattagcttggtgtggtggcgtgtgtttgtaatcccagctacttgggaggctgaggtgggaagctcacttgagcctgggacgttgaggctgcagtgagccaaaattgtgccactggactccagcttggaatacagagcgagaccctgtctcaaaaaaaaaaaaaaaaarttaataatacttttagtgacttttattgtaggtgctcatttagctcttatactatgtctccactttcattttgactactcttccaataattatatgtaacattcttaaattgaatcgtcattgtacattattatgactatgtaaattatttttactggagagctacatgggctactatgaaatgatcaaatatattaacaattttttttttttttttaatttttagaacagatgggatttcaccatgttggccaggctggtctcaaaatcctggcctcaagtgattcacctgcctcggcctcccaaagtgctgggattacaggtgtgaaccactacgtccagcctttttttttttttttgagacaggctctcactctctcacccaggttggagtacagtggctctatctcagctcactgcaacctctgcttcccaaactcaagcaattctctcacctcagcctccagagtagctgggaccacaggcatgcttcaccacgtctggctaattttttgtatttttggtagagatggggtttcgccatgttgcccaggctggtcccaaactcctgagctcaggcagtccacctgcctcagcctcccaaaatactgggattacaggaatgagccactacacctggcctaatgatcttatcaattcaattttttgtttcttctggagttaattaccagattttttcatttcctttagttttctgtatatgttcctcattctttttcttttgttttttattgttgttgttgttgttttgttttgttgttgtggttgttgttttgatgttgcccaggctggagtgtagtggcgcgatctcggctcactgcaacctccacaccctgggttcaagcgattctcatatctcagcctcctgagtagctgggattataggcacctgccaccttgcccagctaatgttttttgttatttttagtagagacatggtttcactatgttggctaggctggtttcgaactcctgacctcaagtgatctgcccaccttggcctcccaaagtgctgggattgtaggtgtgagccaccgtgcttggcccttcattatttttctatatgcccaatcagatttattttacagtgttatcattagtttccaagtgattgaatgtatcagataatcaattgcatctattttttttttcctgagacctcactttcagaactttttctttcattctagtctaaactgtggttggttattctctaggcttgttcctcagtttttatcttgcagttttccctctttcctttgttggatcttgtttcctaattgtagaccatcttctttcttttattctattttgctggagtatagaactctaggttagaaataactttatctcagaatttttaaggcaatgcctttccaattactagtgatgctgtctgtgaattgtctgatcttattctttctcaatctatttattatttatttatttatttaagatggggtctcactctgccacccaggctggagtgcagtggcacaatctcagctcaccgcaacctccaccttctgggttcaagtgattctcctgcctcagcctcctgagtagctgggactacaggcgtgtgccatcatgcctggctaatttttgtatttgtggtagaaacggagtttcaccatgttggccaggctggtctcaaactcctgacttcaggagatctgccctccttggnnnnnnnnnnnnnnnnnnnnnnnnnnnnnnnnnnnnnnnnnnnnnnnnnnnnnnnnnnnnnnnnnnnnnnnnnnnnnnnnnnnnnnnnnnnnnnnnnnnnnnnnnnnnnnnnnnnnnnnnnnnnnnnnnnnnnnnnnnnnnnnnnnnnnnnnnnnnnnnnnnnnnnnnnnnnnnnnnnnnnnnnnnnnnnnnnnnnnnnnnnnnnnnnnnnnnnnnnnnnnnnnnnnnnnnnnnnnnnnnnnnnnnnnnnnnnnnnnnnnnnnnnnnnnnnnnnnnnnnnnnnnnnnnnnnnnnnnnnnnnnnnnnnnnnnnnnnnnnnnnnnnnnnnnnnnggggacagagcgagactctgtccaccccctgcaaaaaaaaagattcacaatgatgtgccttagtgtaggtcctcttttaaaatttattacattggttacttgatagattcttttaatctgaaggtttgttatttagttctagggcttttcttattacactgtgttttaaatgatttctttccttgtattatgttagttctcgctcgcgctctctctctatatgtaaatatatagattttatatatatatatatatatatgggattgataaactttttcttaaagggtaagatagtaaataattcggtattgtgaggtttacagtctttgttacaagtactcaacgctgtcaaaatatacttagtgagtacagaaataaatgagcttgactatgttccaataaaacattatttacaaaaacaagtagccagggcatagtttactgactcaacactgtcaatatatacttagtgagtacagaaataaatgggcttgactgtgttccagtaaaacttcatttacaaaaacaagtggccagggcatagtttgctgacttgtgtcccagaatgattctcttaactttcttcatctttctcatattttctttttctttctttcttttttttttaatgagacggagtctcgctctgttgcccaggctggagtacagtggcgcaatttcagctcactgcaacctccatttcccgtgttcaagcaattctcatgcctcagcctcccgagtagctgggactacaaagcgtgtgccaccatgccctgctgatttttgtatttttagtagagacgagtttcaacatgttggccaggctggtcttaaacttctgacctcaagtaatccgtccaccccagcctcccaaagtgctgggataacaggcatgagctactgtgcctggccagtttttctcatattttcatcactttttttgttttgttttgtattctggaaatttcctcaactttctcttttatctcgtctattaaaattcctattttggatattatttttaatttccaagagcttttcttctctgttcctttttcattgcactctcttcttgttttatgtataattgtatcatctattttctctttgaggatattaatgatagccttttagaggttacttttctcttattgactatctttttttttaaacttctgtagcccccatgtgtttgaattatgggtttttttgtttgtttattttttgtttgattttgagacagggtctcactttgtcacccagggtggagtgcagggatgcaatcatagctcactgcagcttctgtctcccaagcttaggtgatcctcctacctcagcttcctgaatagccgggactacaggtttgtacctccatgcccagctaattttttwaatttttagtagagacaaggtcttgctatgttgcccaggctggtcttgaactcctgagctcaagtgatcctcccaccttggccctcccaaagagttaggattacaggcatgagccaccgtgacaagcctgaattgtgttatttgaattgtgtattaaagtctttgtgtaagggctttccttaattacattgagatccttggcttttagttcacatttatggtccttaaaagctgcatggttacaaaagcagacagtgatgaacaaaaacaaaaacaagctgcatggaagctcgttttgcatggatgagcttcagattataatgatcagacaactagctttttgttgggtattctccaaatgacagaattctttcacctgatgctgtttactttatccagtgaagagttctcctgtcctttggatccgctgaggggatccaaacttggatatgagtgtaggtcaggacaatgagaatgggtcagggattttcactacataacattcagattttcattttattcccatttttagctctgttcctcaccttgctttccatggtaagggagttctaagggtgtgccatcttgtctctctataggtacctcccttggtcctagcttctgtgtctggccacgtcagccaaaatcctcctatctgctttttctctgtcaaaatgagttgaacactctttgtgtgctgatgtctccactgtcactttttgggtttgtagtgaatactcctttttcatcattttagtgaagctactggatgaatggagtgcagtcaatatgtgttatcaacctaccatgttaaactggcatttaaggtcaggctcggtgactcacacctataatcccagcactttgggaggctgaggcgggaggattgcttgagcccrggagtttgagaccagcctgggcaatgtggcaaaaccctttctctacaaaaaatttaaaaattagctgggcgtggtggtgtgcatctgggactgagcccagggagattaaggctgcaagtgagctgtgattgtgccactggactccagcctgggcgaccctggagacctttgagaccctgtcccaaaaagaaaatgaaattggaattgaagagatttggtttgaacatcttttgacaaataagtagtagaaatttttatctgcagctggagttttttggtggtataccccatttctctccccttctctccctctctctctttttactaatgtgctcctcatctctgtctgagacctcatcaaaatggattttaccacccatatttctaccagttttctgatcagtatcacttaggtaatctctaagaagactgaggctttctctatagctcttctttttctgagcccatagtagaattgccttttatgcctgtttatggcaacataggctttttctgcatgtacttccaaattctatcagctctgtccattacccaggtccaaagctgcttccacatttttagttatttgttacagaagcaccccacttcttagtaccaatttctgccttggccatttgggactcccatccccactccttctctctgtttttaaatttaattatttttttttttttttgagataaagtcttgctttgtcactcaggctggagtgcagtggtgtgatgttggctcactgcatcctccacctcccaggttcaagcgattctcctggctcagcctcctgagtagctgggattacaggtgtgtgccatcacacctggctaatttttgtatttttagtaaaggcagggttttatcatcttggccagtctggtcttgaacccctgaccccaggtgatccacccgccttggcctcccaaagtgctgggattacaggcatgagccaccacacccagcttctcttttttttaagtcagggtttctctccgtcacccaggctggtgtgcagtggcgctgtcatagcgcactgcagccttgacttcctgggctgaagccgtcctcccaccttagactcctgagcagctaggagtacaggtgtgtgccatgatgcccggctaattttttgacttctctctagagataacctctcattaggcagggcgcagtggctcatgcctgtaatcccaacactttgggaggccgaggcgggcagatcatgaggtcaggagatcgagaccatcctggctaacatggtgaaaccccgtctctactaaaaatacaaaaaaattagctgggcgtggtggcgggagcctgtagtcccagctactcaggaggctgaagcaggagaatggcgtgaacccaggaggtrgagcttgcagtgagtcgagatcacgctactgcactccagcctgggcaacagagcgagactccgtctcaaaaaaaaaagagataagctctcattacatttcccagactgctcacgaactcctggcctcaagcaatcctcctgcctcccaaagtgctgggactacaggtgtgagccaccatgcctggtctccctctctcttttgaatggagatatgtttacttttagaagtagtatgtacttaccacaaaaaatgttaaatgatatggaactgtatgggctagaaattgaaaagcttccatgtctccacccctaagagtaattgacacccctttagcatggtcagattttgtacatacatactgtccccactttttctttattcttgcttgtttgtttcgtttccttcaggtctccaggaaacctagagaaaaaccgttatggggatgtaccctgcctggaccaaactagagtgaagctaacaaagcgaagtggccatactcaggtagacagataaatgtaatctttttaggtgcactgggggaaatagagcttcttccaaagtgaagcttactaatacttcggtagaatgaaagtagactcygaggccagagagattaggtttgagtttatattttgctacatactagtctgtgaccataggcaagtcctcaaatgcccatctcacagtattgagtggaaattaaatgaaattctttatgtgaatgctgatagtgcaaggtctgttgtattgtaggtgcttcatagatgttaaattatttatcattttactccttagttgtaaagtcatggtcatatagtgcaattcctttggtgagtatatatgcatcaatacaaagcaactttgattataagtgacctctgatttctccatctgtatctgaggaaattgtggacaacttatgtatacataaatgtctagggatagagatgaaatggtcaaatgactatattatttaatatattaatttgattatatctacatgttaaaagcctcatatgtaatctattaacagagatatttaatgaacattttattcaaacactttacatacacctttaactttagtgtctttgtcacatttgagccacttttttttttctccctcaagacaaggtcttgctttattgcccaggctaggtacagtgatcacagctcactgcaaccttgacctcctgggctcaagtgattcttgtacctcagcctcccaagtagctgagaccacaggtgtgtgccacatacatggctaatttttaaatacttttgtagagacaagttctcactatgttgcctagtctggtcttgaactcttgtgctcaaacaatcctcttgcctcagcctccctaagtgctggaattacaggccaatttttgagtcagtctaacaaggttttccagagtacaacatctttatttacttttaagtgtgtggcattgtgactggaaattttatcctaaaccaggaaaatctgttagggtaacattaggacaaattttttttttttttttttttttttgagacggagtcttgctctgtcccccaggctggagtgcagtggcgcaatattggctcaccgcaagctccacctcccaggttcacgccattctcctgcctcagcctcccgagtagctgggactacaggtgcccaccaccacgcccggctaatattttgtgtttttagtagagacggggtttcaccatgttagccaggatggtctcgatctcctgacctcgtgatccgcccgtctcggcctcccaaagtgctgggattacaggcatgagccactaggcccggccaggacaagttggttttttaattcatcctgcatcttatgcatcccctataatatgattcattcacttattcctttgtaaaatccttaaaaaacagaaaattgagacagggtctcactctgtcacccaggcttgagtgcagtgacttgatcgtagctcactgcacccttgaactcctgggctcaagcgatcctcccacctctgcctcccaagtagctgagactacaggcacacgccattacacatggctgattttttttaattttatttttgtagagctagggtctcgctgtgttgcctaagttcttcctgggctcaagcaatcctctcaccttggcctcccaaagtgctgggattacaggcatgagccggtgtgcctggccataattcctttttaatataacttgtttacagcaacatccaaccttagaattttgagatgaatgactaaattattattatcttcctttttttcccttctgatataccaattttattaggtgatatctccgaaaaacccaattttgttaggtgatctcataaaaaaaaaaaacccagcattgactgaggttgttcaaagtaaagttattttatttttatttatttatttattttgagacagagtttcgctcttgttgtccaggctggagtgcaatggcgcaatctcagctcactgcaacctccacctcctgggttcaagcaattatcctttctcagcctcccgagtagctgggattacaggtgcatgccaccatgcccggctaatttttgtatttttagtagatacggggtttcatcattttggtcaggctggtcttgaactcctgacctggggtgatccgcctgcctcagcctcccaaagtgctgggattacaggcatgagccactgcgccggcaaagtaaagtaatttaaatagtgcctctttaacatgacacacagtaaagtaatttaaatagtacctctttaacatgacacacattataaggacttgttatatcccttctctttctggggaataatttttggaaaacttactgccttgtatttgggcatatatgacatgtgggttgggaccccaggatcatggtttccaactctcttgtccctgttgtttcaagcacataaactgaattcacagtcctatccaggacccttggagaagattttcctgcaggagcatttgagctaagagactggctggctggagggtaaattcatcagtactgctgagatcatcatcgtatatgccctgaaggagtggagtacagtggttgagttggggctctggagtcagagatacctgtatttatccattttgttgacttccctgtctccagtacctagaacagtgcctgccacatatcagacactcaggacatatttgtgaatgagtgaatcttagtgtactgggagattcttctaatcatcctgtggttaatatgaagatcattgtctgatttgtagtccctctccttactgaaacattagcggaggctttatttttatagtaaatggagtatttaggctttttttttattttattttgattttagtttttagtttttttgacattatttactttgcgggccgaaagcaaaaaaaaaaaaattatttacttagctttggggacttaacactctcatggaatttccacctatggggctatttttccattctgtttyctgacatttagttgtttttaaattttaattgatagaaattgtatatatttatggtatacaatataatattttaaaatatgtatggattgcagagacactaagtcaagctagttaatatatgcattactttgccgggcacggtggctcacacctgtaatcccagcactttgggaggccgaggcgggcagatcacaaggtcaggagatcgagaccatcctggctaacacggtgaaaccccgtctctactaaaaaatacaaaaaattagccaggtgtggtggtgggcgcctgtagtcccagctactcgggaggccgaggcaggagaatggcatgaacctgggaggcggagcttgcagtaagccgagatcgcaccagtgcactccagcctgggcaacagagcaaagactccgtctcaaaaaaaaaaaaaaaaaaaacaccacatatgcattacttcacatatttaccttgttttgtggtgaaaacacttaaaatatgctgtccgcaattttcaagtatacaataccttgttatttggaggattcaggttttttagtgaattgtttacttgatttgcttctggaattttaaagctattagtcccagtttctgttgaacatggctgccttaatctgtttgggctgctgtaacaaaaataccacatgcaggatggcttataaacaacagaaatttatttctcactattgtggagtctgggaagtccaagatcaacgtgctggcagatttggggtctggtgagggcccctttcttggttcatagaccactgtctactcattgcatcctcacatggcagaaggggaaggggtgagggagcacttcagaactcttctgtcttataagggcactaatcccatttgtgagagctctgtcctcatggtcctaatcacctgtctaaaggccccatctcctaataccattacattgagggtctggggttgggattacacatttgaagttatgggggacacaaatgatcagtctatagcaatggctcacaacatagtgttccrggtttgttcttcctgctattccaattttcccccaagtgtatactttatctctgggtcattttcagttttgtttttttttttttttttgagttggagtctcgctttgtcgcccaggctggagtgcagtggtgcgatctcggctcactgcaacctccacctcccgggttcgtgccattctcctgcctcagcctcccaggtagctgggactacaggcgcccgccaccacacccagctaattttttgtatttttagtagagatggggtttcaccttgttagccaggatggtcttgatctcctgacctcgtgatctgcccgccttggcctcccaaagtgctgggattacagnnnnnnnnnnnnnnnnnnnnnnnnnnnnnnnnnnnnnnnnnnnnnnnnnnnnnnnnnnnnnnnnnnnnnnnnnnnnnnnnnnnnnnnnnnnnnnnnnnnnnnnnnnnnnnnnnnnnnnnnnnnnnnnnnnnnnnnnnnnnnnnnnnnnnnnnnnnnnnnnnnnnnnnnnnnnnnnnnnnnnnnnnnnnnnnnnnnnnnnnnnnnnnnnnnnnnnnnnnnnnnnnnnnnnnnnnnnnnnnnnnnnnnnnnnnnnnnnnnnnnnnnnnnnnnnnnnnnnnnnnnnnnnnnnnnnnnnnnnnnnnnnnnnnnnnnnnnnnnnnnnnnnnnnnnnnnnnnnnnnnnnnnnnnnnnnnnnnnnnnnnnnnnnnnnnnnnnnnnnnnnnnnnnnnnnnnnnnnnnnnnnnnnnnnnnnnnnnnnnnnnnnnnnnnnnnnnnnnnnnnnnnnnnnnnnnnnnnccggcctgggcaacagagcgagactccgtctcaaaaaaaaaaaaaaaaaaaaaaaaagaagtgacaattcttttcaaagcatgaagttagttcctccttatgttcttactaatgctgactggcatatactaggtaaatcttttgtgcttttccataccttctccccttggtcctcgagtgggtataccatttgcatgtgccaggttgagtagaggatgggctttggctgactgggtgcaccctggattgagaagcctgtttggaagtgagtgaggcttttagcatgctgggtctgctgcaggtggtctattagctcagtgaagttgtctgagtcagggtaggacagtaatcgtatgaggtcaatactagctgctatgggagggaaaactccgagtttatcactccactatttatttagtcaaagaaacagtttctaaggaggaaactcttgactaaataaatagtagagtgataaattggtagactgactggctaatgaacacaaatccaagtaacatgggtttgaccatgaggtggagatatcttaggaggttagctatgggatactgacagttcagactgcccacccagtgataggacccacaggagaacgagtgataggttgaggaaagagtcagtctgacctctctgtaatgcagtgggttatgagttttccctagtttgctattgaaacttttcttttgtccttctgtaacccttcacaccttcccttatccattccactgcttctatccattcaactcccaactagttatactataacataaaactgcagctgattgatgtttctcttttatcagcctggatcaaaggatcttttgagtaggtatttataaaaaatgatgttgaagtaattaagactgaggacattaggaggtgggagaataccctggaagagaggtagtcaggagctgttcattgagatgcctttgaatttgactggaagttgctttgcattaattcaggtaataatggagtccaggtgtttggctcgtctgttgatggtcctaagtatgagatgtagctttatttcttctccattcatattttgccttttgtgtgtggcaggatggaccaggtgttcctacttgcttgccttgcctctcatttggtcctgtgctacagtgttgcaagtcttgatggacccttttcttgtaaataacagtttctattgagttatatagttcactctggcagactgccacaattactgcttgagatgtcactagggcagttactattgttattacttgagaccgtcattaggagactgaatgaagggggataaacatagcaatgaaaacttaagacaaaaataactattctaaaggaagggtaacatggggaagaagagaactccctgcttctagtgagcaaaggcagccctgagcttctacagccctttgtatttattgggtaccaagagcagggaggaggaggtaacgattggtcagctgcttaattgatcacaggtacacattattgctaacaggcttcagatgtgcctaactacaagaaacacttgtgcctgggtcgtgactgccctcagcattccttctgggcggcagatgcagtttgtcagtttgccaacatcctgctttcatgagaacagtttcctttttgctcatgtagcctccagtggtatactgagttgatcatgaccctcattctttcggcctccaacagttcacataccatacaatttacctatttaaagtatataagtcaatggctattagtatattcacagagttgtgccaccatcaccacaaacaactttagaacatttttttcatttcccaaagaaacctcacacccttggcagtcgctacctatttccctctaacccactctgatttatttcctatctccatagatttgcctgttctagggatctcatacaaagagaatcctagactatgtagctttttgtgtctggcttctatcatttagcataatgttttctaggtccatccatgtcatagcatgtatcatcacatcactgctttttactgccaaataatattccattgtatggatataccacttttattcatttatcagttgaaggacatttgagttgtttccatttttggctattacgaataatgctgctatggatatttatgtataagtttttgtatgcacctatgttattttgctaaggagtggaattgctgggtcatatggtaactgtttaatcttttcaggaacaaccagactgttttctaaagtaactgcagcattttacattaccactagccatgtataaggagggtttacacatgtatgagggtttcagtttttccacatccttgccaacagtattatctatctttgatatctgtagccatcctagtgggtataaattagtatctcgtggtatggatttgcatttccatgatggctgatgatgaatgaattttttttttttttgagacagagtctcgctctgtcgctcaggctggagtgcagtggcacgatctcagctcacagcaagctccatctcccgggtttatgccattctcctgcctcagcctcccgtgtagctgggactacaggcgcctgccaccaygcccagctatttttttgtattttttttttaatttatttttttattgataattcttgggtgtttctcacagagggggatttggcagggtcatgggacaatagtggagggaaggtcagcagataaacaagtgaacaaaggtctctggttttcctaggcagaggaccctgcggccttccgcagtgtttgtgtccctgattacttgagattagggattggtgatgactctttttttttttttttttnnnnnnnnnnnnnnnnnnnnnnnnnnnnnnnnnnnnnnnnnnnnnnnnnnnnnnnnnnnnnnnnnnnnnnnnnnnnnnnnnnnnnnnnnnnnnnnnnnnnnnnnnnnnnnnnnnnnnnnnnnnnnnnnnnnnnnnnnnnnnnnnnnnnnnnnnnnnnnnnnnnnnnnnnnnnnnnnnnnnnnnnnnnnnnnnnnnnnnnnnnnnnnnnnnnnnnnnnnnnnnnnnnnnnnnnnnnnnnnnnnnnnnnnnnnnnnnnnnnnnnnnnnnnnnnnnnnnnnnnnnnnnnnnnnnnnnnnnnnnnnnnnnnnnnnnnnnnnnnnnnnnnnnnnnnnnnnnnnnnnnnnnnnnnnnnnnnnnnnnnnnnnnnnnnnnnnnnnnnnnnnnnnnnnnnnnnnnnnnnnnnnnnnnnnnnnnnnnnnnnnnnnnnnnnnnnnnnnnnnnnnnnnnnnnnnnnnnnnnnnnnnnnnnnnnnnnnnnnnnnnnnnnnnnnnnnnnnnnnnnnnnnnnnnnnnnnnnnnnnnnnnnnnnnnnnnnnnnnnnnnnnnnnnnnnnnnnnnnnnnnnnnnnnnnnnnnnnnnnnnnnnnnnnnnnnnnnnnnnnnnnnnnnnnnnnnnnnnnnnnnnnnnnnnnnnnnnnnnnnnnnnnnnnnnnnnnnnnnnnnnnnnnnnnnnnnnnnnnnnnnnnnnnnnnnnnnnnnnnnnnnnnnnnnnnnnnnnnnnnnnnnnnnnnnnnnnnnnnnnnnnnnnnnnnnnnnnnnnnnnnnnnnnnnnnnnnnnnnnnnnnnnnnnnnnnnnnnnnnnnnnnnnnnnnnnnnnnnnnnnnnnnnnnnnnnnnnnnnnnnnnnnnnnnnnnnnnnnnnnnnnnnnnnnnnnnnnnnnnnnnnnnnnnnnnnnnnnnnnnnnnnnnnnnnnnnnnnnnnnnnnnnnnnnnnnnnnnnnnnnnnnnnnnnnnnnnnnnnnnnnnnnnnnnnnnnnnnnnnnnnnnnnnnnnnnnnnnnnnnnnnnnnnnnnnnnnnnnnnnnnnnnnnnnnnnnnnnnnnnnnnnnnnnnnnnnnnnnnnnnnnnnnnnnnnnnnnnnnnnnnnnnnnnnnnnnnnnnnnnnnnnnnnnnnnnnnnnnnnnnnnnnnnnnnnnnnnnnnnnnnnnnnnnnnnnnnnnnnnnnnnnnnnnnnnnnnnnnnnnnnnnnnnnnnnnnnnnnnnnnnnnnnnnnnnnnnnnnnnnnnnnnnnnnnnnnnnnnnnnnnnnnnnnnnnnnnnnnnnnnnnnnnnnnnnnnnnnnnnnnnnnnnnnnnnnnnnnnnnnnnnnnnnnnnnnnnnnnnnnnnnnnnnnnnnnnnnnnnnnnnnnnnnnnnnnnnnnnnnnnnnnnnnnnnnnnnnnnnnnnnnnnnnnnnnnnnnnnnnnnnnnnnnnnnnnnnnnnnnnnnnnnnnnnnnnnnnnnnnnnnnnnnnnnnnnnnnnnnnnnnnnnnnnnnnnnnnnnnnnnnnnnnnnnnnnnnnnnnnnnnnnnnnnnnnnnnnnnnnnnnnnnnnnnnnnnnnnnnnnnnnnnnnnnnnnnnnnnnnnnnnnnnnnnnnnnnnnnnnnnnnnnnnnnnnnnnnnnnnnnnnnnnnnnnnnnnnnnnnnnnnnnnnnnnnnnnnnnnnnnnnnnnnnnnnnnnnnnnnnnnnnnnnnnnnnnnnnnnnnnnnnnnnnnnnnnnnnnnnnnnnnnnnnnnnnnnnnnnnnnnnnnnnnnnnnnnnnnnnnnnnnnnnnnnnnnncccgcggggcccgtccgctcctccatccgctgcctcgcgggcggcgctcgccggcgcggcggcaaagactgagacagctccgctgcccgctgaactccatcctcccggctgtggggcggcggtggctgcggtcggtcgcggcagcggctccgcttcatatctgcagctggggcccgcgggcgtcagcgccgcgactgtcccggctccgcactgccccaggccgcagcgcagccgcgccaaccaccacccgcggccaccatggccggacgggctccctaagccaccgaccccagcccgcggcgccttcgagccttctggggcctccggcgccgcgacctcctctgcgctcctcacggaagagaccttttttgtatttttagtagagacagggtttcgccgtgttagccaggatggtctcgatctcctgacctcgtgatccaccctcctcggcctcccaaagtgctgggattacaggcgtgagccaccgcgcctggcataagtttttaattttaatatagtccaatttatctcttttcttttgtcacttacgcctttggtatcatatctgtgaaagctttgcctaacccaaggtcacaaagatttactcttatattttattctgagagttttaatagttttaatcccttacatttggtctgtgatacattttgagtcagttttacagtgtgaggaaggagtcagcttgatttttatgcatgtagatatctacttgtcccagcaccatttattgaagtgagggtttgagctggccatttcactcctcattttctgctcaacaagaagagaatattcacaccttgggttttacttactgagtacatcattttatgacccaaatggtgtattctgtgtagctatagtgatgtctcctttttatcattagacagattacatcaatgccagtttcatggatggctacaagcagaagaatgcttacattggcacacaaggtaagctggtccgtccctcccatgttgattttgtgccatctacttatgattccttgtgccaaatgatagcataatttttaaacgaatggtaacttgagtggaggttttggccactagatcctggccttttataaagatgggtggtggttgagaaaagcaaataagtagtttggggtttctgtaccaggtgtgcctggaaactcaccgcatagagataaactggagatttaaacacataacactactgcctgcaagttttggggctatttcttagtattggcaagggtgtagggcatcagaatgcatcagccagtgagctcttcatgctcttcctgtctagtgagaggccaagaatagcagtggacttcccagagattgagtccaatctaggaatgagtattgctgtcctaataggcctaggctggttcctataccatcacagagcactccagcaaatgttctgacatagatagtatgtgctaataagtctgacagtggaatactgagctctaggaggatttctcatttttttttctcctttgaaatggaggcttgctgtgtcgcccaggctattgtgcagtggtacgacctccactcactgcaacctccacctcccgggttcaagtgattctcctgcctcagcctcctgagtatctgggactacaggtgtgtgccaccacgcccggctaatttttgtatttttagtagagactgggtttcaccatgttggacaggctggtctcgaactcctgacctcgtgatctgcccgtttcggcctcccaaagtgttgggattacaggcgtgagccaccatgcccagcctctaggaggatttcaggtggagtttctataaatgttcctatgatcctagtactcttcctgacctggcctctccatctcaagaatatcatgtcactttcaaagatggtaggaggaaatcataatacagaaagacaacagaccatcagatgggcgtaaggccctttgaccactgcagagcaagatacggtggatacctccttaatcaagtgatcaaacttagtatcaccagtaaaggacaaagggacattatgtacacctcctgatatgatgcattgagaaatgaatatcacctgcattgtgtattgccagttttaaaatctgaatctagtcatgggaaacaatccagattgtgggacatactataagaaaactggctcagactctccaaagttaatgccataaaaaacaaaaaggcagagaactgttctagattaaagggagactaaagagaaccatggccaggcacagtggctcacgcctgtaactccagtactttgggaggctgaggggggagtatcacttgagcccaggaagcagaggttgctctgagccgagatcgtgccactgcactccagcctggctgacacagcaagatcctgtctcaaaaataaataaattaaagggccagtcacaatggctcacacctgtaatcccagcactttgggaggccgaggcaggtggataaactgaggttggaagttcgagaccagcctgaccaacatggagaaaccacgtttctactaaacatacaaaattagccgggcgtggtggcacatgcctgtaatcccagctacttgggaggctgaggcaggagaatcgcttgaacccaggaggcggaggttgcagmgagcagagattgcgctcaaaaagaaaaaaaaaaagaggatcggccaggcgtggtggttcatgcctgtaatcccagcactttgggaggccgaggcaggcggatcacaaggtcaggagttccaaaccagcctggccaatatggtgaaacmccgtctctactaaaaatacaaaaattagctaggtgtggtggtgggtgcctgtagtcccaactattcgggaggctgaggcaggagaattgcttgaacctgggaggcagaggttgcagtggactgcgactgcgccattgcactccagcctgggcgacagaggaaggctctgtctcaaaaaaaaaaaaaaaaaaaaaaaaagagtatctgattagatcctcaactgggagaaaaaaatctattgaagacaaactattgagacaattggagattttttttagccaacattgtatcccatgtttaatgtatgcttaaggtgataatggtaatgttctataggaggatgtccttgttttcctagtaagtgctcaagtatttaggaataaaatatcataatgtctgcaacttctttatttttaattaattaattaattaagttttgagatggagtttcgctctgtcgcccaggctggagtgcagtgacatgatcttggctcactgcaccttccacttccagggctcaagcgagtctcctgcctcagcctcccaagtagctgggattacaggcacctgccaccatgcctggctaatttttgtatttttggtagagacagggtttcaccatgttgcctaggctggtctcgaactcccggcctgaagtgatctgcctacctcggcctcccaaagtgctgggattacaagcatcagccactacgcctggcctatatttctattaatgatgtcatctattgagaagacctattatatatcagatgcataaatgctatctaattattatagagactctgcaagggaggtttattaatttatagatgagcaaactgaaacccaaaagtttacgtgaccttggaccatgcagctagtaagtggcagaaccagggtttgaacccatgtttgtttggttcagaagtttttacaagccatgtctgtggattgtttcacctatgtcagtataaactgctgactttatttcttgagagaagtttactgttaaagggtctaagctgggaagtacaactttcccttcttagtatctctcttgagcctgtgagaagtttgcccagccccagtctggtaactgagttaccatatgctctgactgctcagtactccaattctgccagtggtctgaatgtggaaaatgaagtatatgagagttgctgtggtgcaggagagtaggatgtggatgaggctgagggtcagagatgtggaaaaggtgtccttactgtcttcttgatgtgtatactagggtaatgcatgtccattgtagaacatttagaaaacaaaaataatccctcataaccctaggacccagagataatgttaacattttacagcatctcctcctagacctttatctatgcatacatgcagatataggcatacaaaatatttaaccaggccgggcacggtggctcaagcctgtaatcccagcactttgggaggccaaggcgggcagatcacttgaggtcaggtatttgaaaccagcctggccaacatgatgaaaccccctctctactaaaactacaaaaagtagccgagcgtagtggtgcatgcctgtaatcccagctactcaggaggctgaggtaggagaatcgcttgaacgcggcaggcagaggtttcagtgagctgagatcacgccactgcactccagcctgggcgacagagtgatactcrgtctcaaaaaaaacaaaactaaacttttaatttaaccaaatgtgctctttctatactatctcttgtttcatttaatggtatctgtgaatacctttccatagcaaaaaatacagctcttacaacatcaactttatagactgtataaattatggtatgctattatttatttatttatttttgagacagggtctcactctgtcacctaggctgggtgacagagtggtatgatcatggttcacgatcatggctcaatgcagccttggcctctccaggcacacacaggtgatcctctcacctcagtctcctgagtagctgggactacaggcatgtgctactacacctggctagtttttgtattttttgtagggacagggttttgcartgttgcccaggttggtctcaaacttctgggctcaagtgatctgcctgcctcatcctcccaaagtgctgggattacaggcgtgcgccactgcaccccacctgatacgtcataatttaattaatcctctcttattggatatttagtgtatttctaagatctcacgtttttgacatcatccacttctgcagagagggtattccagtatcatgttagtgcttgctaaaagacttagcaataagggtagtagaaccagcagacttctagaccaaaattaaccattagtactgccctgctttcctgaaagcagagaggaaagaaacacccagaaagtataaggaattatcttgagttgttacgttttttttttcttgagatggagtcttgctgtcgcccaggccggagttcaatggtgcgatcttggtttaatgcaattaatgcaacctccgcctccygggttcaaacaattctcctaactcaggctcccgagtagctgggattacaggcacctgccatcgtgcccagctaattttcatatttttagtagagacggggttttaccatgttggccaggctggtctcggactcctgacctcaagtgatccacctgcctcggcctcccaaagtgttgggattannnnnnnnnnnnnnnnnnnnnnnnnnnnnnnnnnnnnnnnnnnnnnnnnnnnnnnnnnnnnnnnnnnnnnnnnnnnnnnnnnnnnnnnnnnnnnnnnnttgtccttaggaccatgtttagtgagatatcattaattcccacaaagtaaaataatggatggaagagtatataaattaaatggtcaacctgtatagatccagctgtgccatcaaaagcaaaagagaagaagcttcacaaggaatgcggtggtcagagaaagcttcaaggaagaggtggcacttgaaaatgggtagaaaatgaatagcattggaggtgacggagacagcttgagcgaaagaatagaggccaaagtgagcatggtgtgtctatgttctgatgaagtaatttttaagaaagattaaactggtggggtttcccagagtagattggaagggaaaaaggcctattcaaaaaagtagactaagagggtgttacagtaacttagaagatgacgtggtctttgtgtcagtgaaatcgagcaggaagaacaggatggggagaagatgagggcaaaagaataaaaaccaaaaacatttcaaaggtaaaaaatctctaggatttggtgactgactgcttctgggagatgaaggaaatgggtaagtcagtgttgacttcacctttttaagactgaatgatttaagaatgctagtattgttaacagagataagaaagttgcaagataaagctaattttttttttttttgagacagagtctcgttctgttgcccaggctggagtgcagtggtgcgctcttggctcactgcaacctccacctcccggggtcaagcaattcttgtgcctcagcctcccaagtacctgagactacaggcatgtgccaccacacctggctaatttttgtatttttcatagagatggggttttaccatgttkccaggctgatctcaaactcttgagctcaggcaacctgcctgccatggcctcccaaagtgctgggattataggcatgagccactgcacccggccaagataaagctaattttgaaggaggagacttagttacagacataatggatctgagattatgggaaacagaaggttaatggtttagtaagcaatctgtgattataaaactgaagcttaggtgagatgaaaacagctagagattcttacagtttgacactgtcagcctggatgtgatggctgaagttctgatgattaagactctgagagggtatgtagcagtgcttcccaaacctacctacgactcacctggggatctygttgacatgcagattcatgtttcttacactctcccatacgatgctggtgtgattggtccacggactatactgaatagcagggatgtggaaagatgagcagggagctaaccatctatggtttggagttaccattggggagtaaaacagaagcgcctacaaaagaaaaaaagtgtttcccagagtcatgtttcttgtcttctccttttatttcaggtcctttggagaatacctatcgtgatttctggctcatggtatgggagcaaaaagtcttggtgattgtcatgaccacccggtgagttaatcccttttttccaaaggtctccacctccactctgtccctaggcatgggtgattaaagagggaagtttagcttttagaaataatgagggtcagcctggcacggtggctcacgcctgtaatcccagcacttagggaggccaaggcaggcggatcacaaggtcaggagttccagactagnnnnnnnnnnnnnnnnnnnnnnnnnnnnnnnnnnnnnnnnnnnnnnnnnnnnnnnnnnnnnnnnnnnnnnnnnnnnnnnnnnnnnnnnnnnnnnnnnnnnnnnnnnnnnnnnnnnnnnnnnnnnnnnnnnnnnnnnnnnnnnnnnnnnnnnnnnnnnnnnnnnnnnnnnnnnnnnnnnnnnnnnnnnnnnctaatccacaacccgggtatggtggagatgaatagatctaacttgttaaagctttaatccctggctctggcaaccctgtgccagttataccctattttgaggtcctggccttatccactaaaggaagttctgggaaacatgggacaattctccttttatctgttccctatttccagaggggtgctgccttcctgactcctgaattaccagattccctttgctctccatttgttgctactttttttttttttcttctgagatggagtctcactctgccaccaggctggagtgcagtgtggcacgatcttggctcactgtaacttccgtctcccaggttcaagcaattctcctgcctcagcctcccgaatagctaggattacgggcatgtgccaccacgcctggctaatatcttttttttttttttttttggagatggtgtcttgctctgtcacccaggtgggagtacaatggctcgatctcagttcaccgcaacccttgcctcctgggttcaagtgattctcctgagtagctgagattataggaacgtgccaccatgcccagctaatttttggatttttagtagagatggggttttaccatgttggtcaggctggtcttgaactcctgacctcgtgatctgttgcctcagcctcccaaagtgctgggattacaagcgtgggccactgcgcctggccaggaagattttattttatttttattttattttattttattttattttatttttgagacggagtctcactgtcgcccaggctggagtgcagtggcgcaatctcagctcactacaggctctgcccccaccggggttcacgccattctcctgcctcagcctcccgagtagctgggacttcaggcgcccgccacctcgcccggctaattttttgtatttttagtagagaaggggtttcaccgtgttagccaggatgggctcgatctcctgacctcgtgatccgcctgcctcggcctcccaaagtgctgggattacaggcgtgagccaccgcgcctggccggaagattttaatgaaaggaatatttttgaaattttggtctacaaatctggcaaatttaaggaataacctatttcagatgaggaaggaaaaaaatgaatgtgaatgttaaattcccttccttagcactgttataaccaccacttatttggagaggaggtagtgggagaagttctatcttggaatactttggggccactggagggtggcaaggtagatttaggccttttttttttgagacaagagtctcactctattgtgcaggctggagttaagtggtgcgatctcagctcactgcaaccttaagtggtgcgatctcagctcactgcaacctccgcctcccaggttgaagctattctgcctcagcctcccaagtagctgggattacaggtgcccaccaccatgcctggctaatttttgtatttttagtagagatggggtttcaccgtgttggccaggctagtctcgaactcctgacctcaggtgatccgccaccttggcctcctaaagtgctggaattacaggcatgagtcactgcgcctggcctaggcctttttttttttttttttttcttttttgagacagagtctcactttgtcatccaggctggagtgcagtggtgccatctcagctcactgcagtctcaacctcctggattcaagcaatcctcctacctcagcctcctaagtagctgggactacaggtacccaccaccatgcctgactaatttttgtatttttagtagagatagggtttccatgttgcctgggctgggacttcaggcttttacacaaacctcctgctaacataccagtagatgtgtgtttatcagtttatcagagagttctctctgacctatcatattttcatattttctctactctttttttttctttttctttttcttttttgagatggagtctcatgatgttacccaggctggtctcaaactcctggtcttaggtgattctcctgcctaaacctcccaagtagctgggattacaggcatgcaccactatacccagctactatactgtttttgtctctgttcacccagtatttatcccacatatgtgagacgtactattgcgtattaggaaaaagaccaaatgctgtagtaagtgctcagtaactgtctgctatatgagtacatgcagaaactttagctgtgagtacatttgtttagaatgaagaggtttcctttcctttctgctgagaatcaatggtgtaagttagaagcaatgcaagagatgatattgctgcctgggggtatatcaggtctttggggaagccaggttactgctgtggagaggaacgatggaaggcttaccttgctctgtgtgtcttcagctttgaggaaggcggcaggagaaagtgtggccagtactggcctttagaaaaagactctcggatccgatttggcttcctcacagtgaccaatctaggcgtggagaacatgaatcattataagaaaacaacgctagaaattcacaacacagaggtaaatccaggtttcttttttctcaccttgttgaaacagggggagaataattactgtaatgaaaatctccagagggaataggtaggataccagggaagttatgagttgcttctgtttttctagggacaggatgaggatatttaactcacagccaatatagccatattactgcagcacgataggaacattaaataggagtaaagcttataattttagaaatctggggctgggtgcaatggcttaggcctataatcccagcactctgggaggcagaggtggaaggatcacttgagcccaggagttcaagataatctaggcaacacagtgagatcctgtctctacaaaacatagaacaaattagctgggcatggtggcacaagcctgtgaggtcaaggcagcagtaagtttgatcrtgccactgcactccaacctgggcaacagagtgagatcctgtctcaaaaaaaattctggatcttacagtataggaattctgccttttccaaacaattaaccaacccttcctttgggtttgtagtaaagaagcaattatgggaaaagttgacagtggtggataggagccttggtggtagggataaccagggtgttgagaatctggaaaagccagaggtagctaggggcaggcagaaataaccttgttaacgtttacttcttttcttatctaaggaacggcagaaacgccaggtgacccacttccagttcttgagctggccagactatggtgtcccttcctcagcagcttccctcattgacttcttgagagtggtcagaaaccagcagagtctggctgtgagcaacatgggagcacgctccaaagggcagtgccctgagccacccattgtggtccattgcagtgcaggcattggcaggacaggtaacgcacctaatgcagctcttggtgtctgcaggggcagtaggggtggacgaggaaaaacaaagctcttagcccacatctgtgattggagaaggaactcacttgctcccttggtggtgaattgctgtgaaaaatccctcatctaatgtccttttggtggaccaagtgatggccagaatatatatttcacaagccaagtcctctaggggttgatgttttatacaccccatcataacgctgactctgtcacctgttagaactgtcactgcaggtatcccagagagctcagctgggctgctgcttccttcccatccagccctccctggagggactccccaccctgtgctgtgttctccattctggagccagttagcagcttttgccttaagggcatgtacatggtaggaaatgttggcctttctatttcaaaggtccctttgggagaaagttgagaataggtttttgttaggcctctgaaaaacttgtggactctggaaattaggtgtgggagtgctgtcagtctgtctgtctgggattgaagcaggaagttcccctgtgtcaccttcccatttccacttcctgttaccccaagtgtatgtcctgagaaataagaggccttctcatttctctggcctccaacactccctgtgacctccttcttgagtcctttcaggcctaaggccacctggccttctgccatgaggcactttgcctgtgaagtcattcattcagttctgcctgggttatttggtagagggaggaagagaagagaggtaaaccagatgtgatcacttccttccttcttcaggtaccttctgctcactggacatctgcctggcacagctggaggagcttggcacccttaatgtgttccagacggtgtcacgcatgaggacccagagggccttcagcatccagacccctgagcagtactatttttgctacaaggccatcctggagttcgcagagaaggagggcatggtatcctctggccaaaacctgctggccgtggagagtcagtaactctcctacgaacctcctacctgttggccagccttccttaaactaccctggacaccgctgagcctataggttgccatcagttacgctgaagccatggatcaacttctttcttgtgtctcccagcacacgtgtgcacgcaaggcagcctttccctttggctagataaatgtggtgaaattgccactagaaagggccagtagcaatgtgttcttaattcctagcatctgctatcaaactgtgccttattaaaaccaaattgtggctattgatttttgctagggtccccgaggtaagtggggaaggaacctccctcctcctttctcccgccattctttttctgaggtctcctgtctcccactccttccctttcctaggattttatggggaggtttgatgagcatttgcctttctccccagagagcttgaccaagttacatattctagagatcgtcctgagtgccaagcacgtttataagtagggcgtgtattccagtcctttctgtcattctgtgtgtgtgtgtgtgtgcacttatgtgtatgggtccatatgtacgtgtgtatataatatatattgtatgtgataatatgatcgtattctataaatacatatacacacgatactcctttccagaagttcctggggctccgtgttgcagttcaggactccttgcttcttggaccctactatttatcctggactagcttgggttggtgatcatgtctcctcttgtcaggctacagagtggtggaagaggacacacacacatctcctccatgttcctgccacagggccccttccttaagtaatgacttatctccttccagttgccacctgttggagccaagaatgtattagtttgtggtgacactgggttagctcagcatggatttcccttatccgatgatttttctacatttacttggccaatttggggaacagacctccactgtgattccatactctctctttgctttcactatcccagggatgggaggcggagggtagagatgaactcactgagcagccagagccaaatgcaatcggtacgaatcttagaaggaaggagggggagcccaggtatgagaaagaaaaaaccactaagaaaatacctccctgggaggatgagctggggccctttttcttttgctggatggttcctttatgcagcttggccctgtctaccgagatgcccatctcttcctgcctgctagcctgctagaccctcaaactgggtgggttctgtgtcaataaaaagcttcaccccctggctgagtgaggtggtcccctgcaatcactgtttgtcccctacccacccaacctgtccctgcctgctcccagcccactcatccttatgtgctagggataaatcaagagtcctcagcactccacattcccaaaaaatcccaggaactcctaaaccttcccctgtgacagaagatgaggttggcagctgatcagacctcaataattttatactgtaataagctctttgaatgtgtatattattattttttacaatcatttcattttgtatttaatatcaatggactgagtctgattcagaaaataattgtaatgttcatattcaatatcttacagtgatacagttttgtatttacatataaatataccgacatgatcaaaacccttttagcttcatcaatttagcagcctgggacatgagggagggggtccaggagctggtctgggagggatgagggaggcagggagggacccaagccttcagtatctgagactttgagttctgacactatgagttcaccttgtctgtaggccatggccctatctctggacagagggaccagcaccagttcagtgcttgagatgtgctaagcactatgctaggtgcttttcccccaccctgcctcattcaaacctcacaacaattcagtgagatattatcttctctcccttctcctgtgcacccctttctcatttctatatagatgaggaaggtgaggtccagagggttacagtgatttgctctaaaacgagctcaagttggtctgcttacaaagcctgtggtctcttcactgcatggaagatggagatcttgtgtttggagaacagaggtttgtttagctctcctttcagagtaaaaaaagttcttaaattccaggttgttgttcttgtgcccatgcttcatgtagtagacgcgaagggtgacagggttggtgactgactgtcctagctaggacctcctgatgtagggtcctcatgtctgcagcgtaccaaaggggttatcattctccccaggagactccatatctatgggtacatggtctttgtgagaagatcttgagtcatttgcatttatctcttagaaagaaaggaaccagaagctttgtacatggaagaccactccccatatcatacctgttggctgttgatggcctgcccagttggggcagttgtggctgggaaatattggggtgttcttaataatagtcatagcagccaatttactggatgctcactctattccaggcactgttcagagtaatttctaggtatcatctcattcaccctcaacaaccttttgaggtaggtattgacagaagaaaaaaattgagagacaggaatgttaatttgctacagccaggatcccagaccatctgactccaaagtatcttctttcacctcttacactagacttcctctaaggatccatcttctgatctgccaataaatttttatcgagtttcttaccataatcaggagctcaagtgtagagcagaagattaatctagttccttctccagatgagcctccattctcttgggagtgcacaaacataagaagtgaacagagattcttggaaatctgagaaaccagagaggtcaggggtttggtggaacatgtaagaaatgggattaatgataaacggcctggaggaggtaactttaaattgtcatttatttgaagaggctgtaacccgactgccctgtgaatttaaggttatgcatgagttcctcattgcatatctgaagactggtgaggttatctatcacttcagctccataaaatgctgatttctgggcccatccagtaggttgttagtgagtgacaggattatccaggtttgggaaccatagatttagttcatgtttctgaccctatagagagttaacaaattgatgtctcctaaattttcagtaaaactcagaggaactcctcccactgccattgtttgtagcttttaccagcgtgaacctacctgtgttaggtgttaaaggaggaggtaaaggaaagggaaggcagagacgcaacccagaatctgtttggcaagtcagggttctcatacaggagacttagtgaacaaagcaagagaaaatgctcagggtccaagtgcagtggctttatgcctgtaatcccagtactttggaaggccgaggtgggcagatcacctgaggtcaggagtttgagaccagcctgaccaatatgatgaaaccccatctctactaaaaatataaaaattacccgggtgtggtggtatgtgcttgtaatcccagctactcgggaggctgaaatgggagaatcacttgaatctgggaggcagaggttgcaatgagccgagatcgcgccattgcactctagcctgggcaacaagagtaaaactccatctcaaaaaaaataaataaataaaaaagaaagacagtgttcaggaaagaagaaaacactgagctaaagcaggcttctgcttctgatttgatggctgtttgtttcacctttctctaacattcccatgctatataatttttcaaacatgagataatccctgtgtcctttttcccattgctcccttcatcttgcccatcctcattggctaggatgggactcctgagacgaagggtgccccagcatcctcagcctcggaggcccacccttatcagtcttcatgtgacagtatgcaggtaaatgacagagtaggacttgttcttgggagaatggactatttagcatcatagccctagggaaatttggttccttccctgaaaggaatgcttcctgtctcttgggacagacagacacacatacaaaaacttttataaatcagagacctagagggaattgggccaagaggcattggccaagtagaaaagcttctctagagtgacccagctcttttgtggttttgaggtcttaccactgaaccaaacccaagtcctaggttccctctgtaaaagaaggggctacactagatgatcctaccatgggtcctctgactgtcagggtccagttctttgttagacagtgcaaacacccatagaggagctattaggcctttacttgggttgagttggctcccactagcactccccacttttcattttttttactttcagagacagagtctcactctgttgcctaggttagaggggagtggcatgatcatggctcactgcagtctcaacaactgggctcaagcaggaacccagctttttttttttttctctctctctctctagagacaggatctcactatgttgcccaggctggtctcgaactccagcctcaagcaatcctcctgcctcggcctcccaaagtgagaggattacaggcatgggccaccacacccagcctctccagttttagtgtgttttcagagtctcttctttcaagctgctgctacttccctagcttccctcagttctcttcccccttggccttccaattggaggaaaagcaggtcaggtctctgtcatctccaagaccagcctataggcctttaaagtttccctgtttcttaatgtggggtctacagggtttctcagaggcaaagcatgaacagaccaagggtcctatagctcccaacctagtccttagatttctctctggccttggttactcccacaaaccactgtgagcctaccaagggcaggaatggaaatgcccatcagcctgggaaccatctttttctcttaggaggtatccgccctatagttacctttacacaacacttgtgaatatcaagtgttctagactgcactgttcataattgactacagagaagactaggatcttctccacaaatagaaatatatcacttttacttggagatgttttcttgggggaaaaaaaatctagcaccttgaaacctgttacaatgtttaaatctcccttctttaccttggctgtcataaaatcctcctgtttgagctaaatgtggcctgctgaagtcttaaatgcccatatttttcaggctaaggccatggtggacatagctaactccactagaatcctagctgggggtgttggaaaaaacggtacagtgcccctctcagactccaggctcacgtccgtctcccctccccgcacattataatctactacttctctaatgctgctgcgtagtttgtcttaaagcctcaagactggccagatgtgcacctgagtaaaggtcagccatttcatctgggggctctttcttgacttctaatgaattttcttctgtgaaaaaatgtatttttaataaaaaattttctgtggccagcatccagtggaagtctggagtctgatgtgcagggcagatactggtctggagatgtcagtttaggacttagttagacagaagcaatgagccttgaagtgagaatgaggaaggcaagagaggagatacatttggatgtcaccaacatttaggtaatgggcggaggaagaaaagctgctgaaggatactaatgaacaggcagaggtaactgagcacaaagccaggctgctttgtcacaggctgctgagaggtaggtagtggctgggacgaatgaacaagatctgaaatgtgggttcattagaagtcttcgaagggactatgtggctgttagggaggctgcatgagagagatgtgaaggaatagactgcagtgcccaggctgtcctcacttaaaccaaaacaaggcccaccttgatctcttacacattaggcttctgaataagattttctttgaacaaaggaccttgctgggtgcagtggctcaggcctgtaatcccagtgctttggggggctaaggtgggaggatcacttgaggccaggagtttcagaccaacctgagcaacatggcaaaaccccgtctctaaaaaaataaataaaaataataaattctcaaatggcaagctattctatttttaaaaagcagtaacaaaggaactcgttgctttaaaaaaaaaaaaaaaaacgtcaggccaggcgcagtggctcacacctgtaatcccagcaccttgggaggccaaggcgggtggatcacttgaggtcgggagtttgagaccagcctgaccaacacagagaaaccccatctctcctaaaaatacaaaattagccgggtatggtggcgcaagcctgtaatcctagctactggggaggttgaggcagaagaatcgcttgaacccaggagacggaggtttcggtgagcggagatcgcgccattgcactccagcctgggcaagaagagcgaaactctgtctcaaaaaaaaaaaaaaaaaagccaccaaacaactggtaaagagaaggaaacactttgaaaacataaagccaggtaaactgaggaacatgctgagtgacccagaagggtaaactaatgctcagccaggggaaacatttcaaggcagtgagtagcagtcataaaaattccttcaaacattccgagcctcccaggagaatggcgtgaaaccgggaagctgagcttgcagtgagctgagatcgcgccactgcactccagcctggatgacagagcgagactccgtctcaaagaaaaaaaaaaaattccgagcctccaaggccacccagaaatcagaaattacggaatatataccatctaaacctggttgcaagagaaatggagtttcttcacatcatgggattatttggccctctaggcctgctccagggctcattgctcaatcggactttgcatttgaatggccaggagaagagggaggtagggatgagataaaggaggggaaaaagatatgagaactcttgactgaatgctagggatacttaatttttttttttttttttgagacagagtctctgtcgcccaggctggagtgcagtggcatgatctcggatcactgcaacctccggctccccggctcaagtgattctcctgcctcagcctcccaagtagctgggactacaggcgcgtgccaccatgcccggctaatttttttgtatttttagtagagacggggtttcactgtgttagccaggatagtcttgatctgacttcgtgatccaaagtgttgggattacaggcgtgagccaccacgcccggcaggcatacttaattttaaatctcacatcttcccaccgaagtaggtattctgattcttagattacagataaagaaactgaaaagataaatgatttgccaaaatcatcttgccttgaacctagaagatgctttgggttgtgggtccctggggagccagcctcatatcctccttacctggatattactgagagtcttagccctcagagcttgtgtggatagggtgctggcactgatatccttggcagagtcactgaagtgcaggccctaaatgtctctcagtcaccacctaccataagtgccctaaagaactttgaatgagtcctttttgtgaaagagagagggtgtatgtgagacacc

SEQ ID NO: 97097 - DNA, 93055 bp, Homo sapiens
  misc_feature (1)...(93055): n = A,T,C or G
acctggccaacatagtgaaaccccatctgtactaaaaatacaaaaattagccgggtgtggtggcacacgcctgtagcctgtagtcccagctactcgggaggctgaggcgggagaatcgcttgaacctgggaggcggaggttgcagtcagccgagaccatgctattgcactccagcctgggtgagagagtgagactttgtctcaaaaaaaaataaaattcttttcacccactgtcactgttctggtcaatcctcctttcgtgtctcctgaattattgggaaagacttcccaataatttcctaactggcagcaggccctcattctgcccattggatgccaaggtccttcnnnnnnnnnnnnnnnnnnnnnnnnnnnnnnnnnnnnnnnnnnnnnnnnnnnnnnnnnnnnnnnnnnnnnnnnnnnnnnnnnnnnnnaccccaccttatccacattaacttcctttcctcaatgcctcaacaaacaggtttttttgtttgtttcacattgtgtgctctggctctaggctcagctctctggaatacagacatgtggggtggcttctgtcccctagaaactccttttggttagaagttatgataaataaagcaaatgaggcaaggaaggatctgagtcaaagctttgacttgagggctgctgaaggtggggaaagctttcggattgggtggctttgatagagaaaagaagccttctctttccccagctattccttccacaaggaggcacttctgcagtctccaaacgcagtattacaacagcctctgggcctccccttgctgcctataggcacttctctctcagtgcatcgtcagaacccatctttctgccagggtgccaaacatcttacactatagttctgggtctgtgggccttgtgaccgtgctgcctgcacattctgctgcgcacgtccaagaattttactcaactaaaagtcttaaactgtttgttccatctccccacccctccttttttattactacagccacatatgaaggtccttttttgcattcacccctttgtgtcctttgatgaaaatgacctgcccctccaatttgctggatgaaatctttaagacccaacttgaatgccacctccttcatgaaacctttcccaattctccttcagcgaaaaggaatctctcttctctgagctcctatttacatacacattcctattttcatacacattcctgccttgccttagttccttacgtagaatctcctcggctgaatctggagcccttggaggggtagagtaagcatgtcatccagtctgtaattgcacccagcagcaggtacgtatgaatgtctgcctcacccacagtaggtgctcaggcaagtgcctgttgcccgcggacgcagggcttcctgtttgcatcactcatttttagtcgcctaacagagcggaccgaacacggttaggtcacacagccacaggagtctgcccactccagccagtgactagggtgctcctacccttctctcctacctagttccaaatgggttgtgtgtgtgaaggaagttggggccgggtagctccgctggctcgtcctccgcgtccacccagcggatctccgagtcccaggcggcctccccccagtccgaggacctcaagaaactcgagtcggcggcgagggagctatatgggcctctaccacggatgcgtctcccactcgcgtttagtttaattaattaatttatattttttggaaggagggggcgttcaatgaaggggaagaggcggggcgaagggcggaggcgggcccagggtgactgacgtgagcgccggggagccaatagcccgtggggggcgttcccccccattcaggactcctcgcctggctcggaaggtatgttaaacagctgcttttaatttggtccccccaatctcaggcgtttggggggctagtccgccggccgctcggtctggccggcccgacgtggtgtgggccctgcgggccctgggaccgagctgaggggaggctcggagttccgcggccgaggtaggcgagggacaggccaggaaggagagctcttggcgccgcccgctcgccagtgtgtgtgtttcccagcctggccggagccgtgggagaggggtgggcctggcctggggtcgtccctgcgccggccgtgtagcctagtttatctcaccgagcagtcggtttcggtaggttttggcggcggactggagaaggggcgggcaggagacccccgactcctgttgtgccgtttttttaaaaagaaaaatactggaaagaaaagggggattccgcacaccgactagaaccgggccggagctgcggcgtgcgggctcggcagggggcggcggctcgagcatggtcggcggggcccactgagctcgcggcgctcggagttgctcgagagctggagttagcgagcgagccggggcccgcggcttccctggctacccacgctggacaagggcggcagccgccccgagggttttgtttttgcccgcaaacttggagggggcggtgggcgcgctccggagaggcgcgggcactgtgggcccgcggttgttatggactctgggggcgggggcaacaccggacttgcgggaggggcggccgggggcgggagaggccaccggaaagagcccctgcgcctcgccgctagccctgcgagctgccgggtctccaaactccctggccgtggcggtcgagtcagcattcggtgccggaacccgtcaggccgcgacccagcaaggagctcgcatcggtggtgcggaaaacccccagaaactcggcggcttcgtccgcggccccggctgatccccttgcaaacatggagctgcctgcttccccgcccaccccaaggcggcggcggcgactgctgctctcttcccctcccccgaccgtgccgccgccgggctcccccttcccgcgaggtgctgctgcggaccgctcggcgcggatggggcgggggcgggggnnnnnnnnnnnnnnnnnnnnnnnnnnnnnnnnnnnnnnnnnnnnnnnnnnnnnnnnnnnnnnnnnnnnnnnnnnnnnnnnnnnnnnnnnnnnnnnnnnnnnnnnnnnnnnnnnnnnnnnnnnnnnnnnnnnnnggcggggaggggcgcggggggcgcgcctgtcagccgggatggcggccgcgggcgggtaggcggggcgccggcgggaaccgtcccggccgggcggggcgacgccgggagaggcggcgcaggggcccagtccaccgagcgccgggcggcccttgcctgcactcctcggcccagactgtttactatctactccgccggcggcttgtgcaacccgcctgcaggggagctgaggggcggacccctttcctctctcccacccacctccggctctcccggaggccccgccttctcttgtcttccactggctaggcgagactccctttttttctccttcttggatgtggattggatgacattctcccgagctccgcctatcgggaggccgggctggagtttaagttgctaggattttttttttcgcggagggaggagggacggttcttgcggatgacgtgaggcgcaaggtcccgcccccgcctctgattggtggggcgggtagcccggcctcctccggcggagagagctgggaggggaagtccacccttgctccccgcctccctccgctcttgagcgcgctccgcacatgtgtgaggcccgcctagctccttcgaactgccctcccgcccggaagtcctaggctcggcgcccttggcgaggggggcggggagagccgagaagccacacaaaggttccaccgaggctcgagacctagtagccttcggggtgaagccaggggattacagtgcggagtggatttcgggagcgaaactccggaggttctgctgggtttgagatctgcctttcggggccggggccaagtactaaagttctaaccctgtcgcttggctatttccgtgccccttgacttccctgagcttaagctcgagaactctgcagacgctgcaagtgtctgttctttcctaggcatggcagcggctgtccttagttggctgtatctgagactctgacaacctagtgccctggcctggggcccttaggcgagatcttagcgcaggtggtaccctgtgttcacgggaagtcgtgggcggcctaatgctggcttgggttctgagtagttcttgataccatggtgggaatgccctgtggtactcagtctagtggtggaaggcggcgcaaagttaaaagtagccgtgggtcagttctgctggagtgccgcttcctcctaacctccgagcagtttggccctggggtcgcttcgttggtctgacttatttttagagctctgtcctggggcagggcttggctactggcgaggctgctcccacctgtcggctacccttggagttcacaattcgctgctgtggtttcgcggctcgaagccatcgctggagtcaggcccacctgctgccagagctcgttcctggccgtttccgctggattgcagagggaggacagtgttggacctaggcgtgggttccctgggcgtgtcccttggggtcttagctctctgggaggagggttctacttattcgggagagcggtaacaacgtaatcccgtcacctctcctggcgctgagagagcgccccccaaagtaagatcagcgtcaggcccacgccctatttggtgaataaataaaagcaaactaggaattgaaagcactttgtctcactgtgtgttcgaggcactgttacctacacagagagggcacaggaactgctattaacactcccggccaaggagaaggtgaacagccgttatcttatgtccccaactacggaaattttatccattctctgagtgtggcatgtccccaatgttaatttatgccgtggcctgttttggtgttttcctctcctttctcagttctgaggatgcctccagatccacccgggagatcgtgagtaccttgtgcctcacgctccgccttccggaggcttgccagggcggtggctgttagagcccgcctctcttttggttatctccgccctcttaggactgcatattcagctctagggagtttacttctccgcctaggtctccagaccttagttctgtactctacttggctgaaaggagttgccagctgctccggatatttgtgtttacaaggacgcagtgtgtagaatgtaaactgtaaagataactggacggaaggatgagttctcattctctcattttttttgtgagggagtcctccatggtgggctgcctttccttcaaatcctaggatgtggagtctccgctgatgagctccgctccccctcctatctcgggccctggaactccgagcttcagtctctagtgtaaacattccacaaaaggactgctaaggttcagcctcctcgcgcagggtggaattagctccttcctagacgggcgccctggccaatggagggtcctaccagcgccaagatatccaatccgactcttggggcggggcctggcccggcagtgcggtaggcggagcctgtttcacttacagacattttaccccacatcggttacttaccttactggggcggtgggagagccaggggtagccttccaatgcgatgaccagcggaggcgggagccaacttgttaggcctgtggctgagacgctgcagggcgggttatgtggtgtcctccaatgagacaggaagagcttccctgcttcctccaatagtgttggggctcgggggtgggcttcagcagtccgtctccaataggcggggttgagttagggaagctccccgccaataggggcgtggagaaggagagcggctccccctcccctaccagtcgagggggaaggggcgggaaaatcataagacaggcctcggtggttggctgagtctttgacgggcgggtattgcgtcctgtattggaacgaagctgagtcttccctctgcggggcggggtcgggggagtgggcgggatttcccgggtaacagagaagcggccgcggcggtagaggcggcggagacggtttctccatcttcccccctccccttcccccctcggagtttccctccctccctccctccctccttcccagtctgggcaccggagcctgtgaccgcttcgttagtggagaggtagctggcagtccgcttcggcgggcctgtgccccgcgccgttctcggggcctccctgctgagctcgcggctcacgctgagagggacacgcagtgacgagcggccgaagcagctttgcggtgagagcacgctgggccgggggccgggcgggagcctggtggcgggtaacgccggactcgagggtgtgtatttttggnnnnnnnnnnnnnnnnnnnnnnnnnnnnnnnnnnnnnnnnnnnnnnnnnnnnnnnnnnnnnnnnnnnnnnnnnnnnnnnnnnnnnnnnnnnnnnnnnnnnnnnnnnnnnnnnnnnnnnnnnnnnnnnnnnnnnnnnnnnnnnnnnnnnnnnnnnnnnnnnnnnnnnnnnnnnnnnnnnnnnnnnnnnnnnnnnnnnnnnnnnnnnnnnnnnnnnnnnnnnnnnnnnnnnnnnnnnnnnnnnnnnnnnnnnnnnnnnnnnnnnnnnnnnnnnnnnnnnnnnnnnnnnnnnnnnnnnnnnnnnnnnnnnnnnnnnnnnnnnnnnnnnnnnnnnnnnnnnnnnnnnnnnnnnnnnnnnnnnnnnnnnnnnnnnnnnnnnnnnnnnnnnnnnnnnnnnnnnnnnnnnnnnnnnnnnnnnnnnnnnnnnnnnnnnnnnnnnnnnnnnnnnnnnnnnnnnnnnnnnnnnnnnnnnnnnnnnnnnnnnnnnnnnnnnnnnnnnnnnnnnnnnnnnnnnnnnnnnnnnnnnnnnnnnnnnnnnnnnnnnnnnnnnnnnnnnnnnnnnnnnnnnnnnnnnnnnnnnnnnnnnnnnnnnnnnnnnnnnnngatctgccccgccctatgtctccgtggggagggaggggcacccgccgactgggagctgtggaggtgtcaggacttactcttgtggctgggtcatgccttctgcctgggggcacaagggccctgtgctggagctgctttctccgctttgctccatgcagcgtgtctggcaccgtgcagccaggagagtgggagcatggtcacccccactcccctcttggttgtaactattggggcgaagtgcccaaggtcctcttgtaggagcgtgcgtggctggtgctggaaccctagatccgcggtggtgatggtaggggaggggcagggagtcatcagagactagaaatgtggcggagggaaaaccttccctggggttcccttgatgttcagttaccgtggctgtacggggcggggcttcctttgagccaatgggtggtgggtagtagacttggcgtctgtttcggtgcgttaggactttaaacgaagttagccttgaaaaggcagtggaagctcctcctctttacaaggctgagatttataacaggaaagtttggatttacattttaatctcaaaactggtctgtttataaagtagggtttgttttttttttttaagaactcagactttgaataaaatactccgatatctctgacagttgtatttttgaatgctttcattgtgcacatggttctgctatataaacttagtttcctggacgggcgcggtggctcatgcctgtaatcctagcactttgggaggccgaggcaggtggatcacttgaggtcaggagttcgagaccagccaggcttacatggcgaaaccctgtttctactaaaaatacaaaaaaaagctgggcgtggtggcaagcgcctgtaatcccagctactggggaggctgaggcaggagaatcacttgaacccgggaggcgagggtgcagtgagccgagatggtgccattgcactgtagcctgggcgacaggagcaaaactccgcctcaaaaaacaaccaaaaaaacttggtttcctaaagaatttgctatttaggtaactataggtgaaaagtacttttcttttttattttatgtacttatgttagaccatctagaccactttctatttatactctacatagtacagtgttgttgccctttttatttcagaggagggtggaattgtggatcagggtagccttctgtatgtgacttctgtagcgttgccctccagcctgtattggagagttgccttagggcatttcagatttagatagcagaaccacattagatgaggtttttgctttcacttgatacattatcttttcctattgagagaaattatttcaatgtttttcacatttttcatgagaaaaataaacatggaaccaatgtttatttatgcagtaatgtctaaatgagcctctggttaattatctgaagtgaaattctagatttgtgctttggttagtagggcctgagtggtaccctgtgctatatttatgtgaaaagggtaggtgggtcctaccttctctgctaaggaagttgcaaaagcaatagcattttagtttagcaaatgatggctgtaatagaattggtggggagacaaaaaatccaggtggttttttctgatgccataaactgagagagatagtggagaacgattgaccattgaggaaaatttgggctacatatatagttcccatgatttgcagtgctgtatactggggaacacagaagagtctataaggattcaagtaagaacctggttttgctgtattaggaacattttcataaatgcttcataatctccagataattattttatatactataattttgttcagagataaatagcttagaaagattggcacttcgtaattaagagggttttaataatttacatacagagaaagactttttttcttttttaaggaaggaggtgtgtagtaatttgacaagattcctggtgaagtataattctttttacatcttcagtgggagcagacaagacactggagagctgtgcatggcagatgttagtacctgggaattttaactggaattaagaggttatatccctggcattcagtagtttagcatagtgcttttcatggctttctctcttttctgggcaatccaccagccaagagtttgttaagctttactttctgtaggcctttaaaaaaataaatagtatatgctttttcaaaatacaccttcctcgccccttgaaaaataaaagctgatatttattgagcacttactgtgtcacagatactgtgttaggcactagacttttttttttttttgagatggagtcctgctctgtctcccaggctggagtgcagtggtgcaatctcagctcactgcaacttccgcctcccgggttctagcgattgtcctgcctcagcctccacgaagaagaagctggggcgccaccacacgcctggctaagttttgtacttttggtagaggcagggtttcaccatgttgatcaggttggtcgcagactcctgacctcgtgatccgcccgcctcagcctcccaaagtactgggattacaggcatgatccactgcacccggccgcataatgtctttttttctcatgtctttttttttttttttttagacgaagtctcgctctgtcaccaggctggagtgcagtggcatgatcacagctcactgcagtgttgatcttctggacttaagcgaccctcctaccttagcctcccatgtagctgggactacaggtgtgtgccaccacgcacctggctaattttttttatatttttatagaggtgaagtcctgctgtgttgcccaggctggtctcgaactcctgggctcaagaggtccttctgcctcagcctctcaaaagtgctaggattaagacgtgagtcaccgtgcccggtcatgggtggcaatttctacctgatgtatttcttatttgccccttttgcttttgttttccctacccactttttgtcttgtatgcttgtatgttacccatatttctcagcatgacagtggacccttcatgagtcttcttggtgtcctccagggctaggcttgctgacatatgggctattggaggatatgcaggtccacatcctttatttgcagttctgaaatgcaagagtttttgttttttggtaagtctagttccacaactagttttggggtacagcctgacctgggctatcctgcatgatgcagaaatgtgactgcttgattatggggagctactcagccctagctgggagagagagatgatacagtatatgtaccatattacctttctaaaatccaaacaatgctgatractctaacggggatctctccctctaccatagactaatatgtttagtggcccactcaaggtctccactcgatgtctcctcttggataactaagagacattgttgactcttctgtgtctttttcatatgtggtccatcagtaaattttactgctttatattcaaaatactatccagaattagaccacttaggatctgcatctccactgccctagtcagtgcctgtgcatctctagcttggattctattctccttgttttgttactgcggctcttaaatgtgttctcaacatagcaacccaagtgattcttttgaaacctaagtcataccgtgtcacttctctgcttaaaaccatccagtggctttccatttcagtctgagtattaaacctgagtccttatttagatatgtctgtaatgagctgggcgcggtggcccatgcctgtaataccagcactttgggaggctgaggcaggcggatcacgaggtcaggagattgagaccatcctggctaacatggtctccactaaaaaaaatacaaaagagttagccgggcatggtggcacacgcacctgtagtcccagctactcgggaggttgaggcaggagaatggtgtgaacccgggaggtggagcttgcagtgagccaagatcgtgccactgcactctagcctgggcgacagagcgagactgtctcaaaagaaaaaaaaaaggatatgtctgtaatttcaccattttgggagctcaagtgggaggatcgtttgagtccaggagtttgagaccagcttgggcatcataacaagaccctgtctctataaaaaaattaaaaattagccaagcatgctggcgcgtgcctgtagtcccagttacttgagaggctgaggcaggaggattgcttgagctcaggagcttgaggctgcagtgagccatgactgtgccactgcaccccagccttgacgacaaaatgagaccctgtgtcaaaaaataaaaaaacacctgtaagaacaaatctgatgtaccctctgcctgccacccttatcctagtacctctctgactacatttctgactagtccttctttcgtttttcttcagctacccagccttcatgctgttttggaacatgtcaagcacatgtgagccctcacaaagacatgagggtctttgcggttgctgtcccctctgcctagaaggcttcctccactaatttctgcatgactagctccctcacttcctttactcagaagttaccttatcagtaggtattatctgaccattcttatctacaatttcaaaaactcttccttgccttttgttcttgatacctgtcactgcctactattctaaatattatactttgtctattgtgtcatctttcactaaaatataagcttcttgagggaagagatttttgtttaccgttgtatctccagctcctaaaacacctggtgcatagtatgtgctcagtagatattagagaatgtatacatgaatgaatgatttggtttccaccacagacaagacaaagcagtatgctgagcatggtagaggatacatagatggttaaagatgttatgtgcccatgtttgtgtgggagcagaagagctaatgtgataaaagcagtgtgagatgtgagtgacacttccacctgtcctttcaagaactatctcaagttctattctttgtaatgctctattttcttttctttctttcttttttttttttttttttcttttttttgagacaaggtctcactgtgttgcccaggctagagtgcagtggtactatctcggctcattgcacacacacacatacacacacccagcttcaagtgattctcctgcctcagcctcccgagcagctgggattacaggcatgcgccactacacccagctatttatttatttatttatttattttgagacggagttttgctctgtctcccaggctggagtgcagtggtgcaatctcggcttggcacaatctcagctcactgcaacctccacctcctgggttcaagtgattcttctgccttagcctcccgagtagctgggattacaggcacccaccaccatgcctggctaatttttttttttttttttttttttgagacagtgtctcgctctgtcgcccaggctggagtacagtagcgcgatctcagctcactgcaatctccccttcccaggttcaagcagttctcctgtctcagcctcctgagtagctgggatcacaggcgccaccaccatgcctggctaattttttgtatttttagtagagacagggttttaccacgttgaccagccttgtcttgaactcctggcctcaggcaatccacctgccttggcctcccgaagtgctgggattacaggcatgagccactgcacctggccttatagatattttgaaagattatatttcttatattaaatagagatagggtcttaccatgttgctcaggctggtcttcctggactcaagcaatccacctgcctcagacacccaaagtgctgagattacaggtgttagccaccatgcctggcctaatacttaatttttaaaaaactttttctttggaaataattttagacttcaaagagagttgcaaaaataatacaaataatagccctataatcttcacctagattccccaagtgcatcttttaaaaccacaatacagtgatcaaatcagaaaatcaacattgataacaattattaatacattttgaatttaactaaatttctgttcattttctacctacagtagtaagaaatgtctgggtaacatcagtgtcaccgaagtctgtattgcccagattggtctcaaactcctgggctcaagcagtctgcccacctcggcctcccaaagtgctgggattacaggcctgagccactgcacctggtctggactcaattttagtttttgagttttgctttttttttttaaagcagtactaactacttgtaaagatgtatatttcatgacttttatttattggaggtcttcaaaacagcaaagagaaaatttatttttatttttaattttatttttgagatgcggtcttgttccatccccaggctggagtgcagtagcgcgatcttggctcactgcaacctccgcctcctgggttcaactggttctcctgcctcaacctcccgagtagctgggattacaggtgtgtaccaccatacccagctaatttttgtatttttagtagaaatggggtttcaccatattggccaggctggcctcaaacttcttatctctcgaagtgctgcgattacaggcatgagtcaccatgcccagcctgaaaatttattttttttccaaaggaataaactcattttagctattaccacttgtacatcgaaacaatgttrtggagttttactgatcttatttttcctgtatattgaaatgttttggtatttcatcatcctaggaattatttcatcattactcatcaattctcaaatatgctaaagaggactaaaataatatgacaaagggagaattatagaattgcttaaaaggatatgcagtagtgaaataaatcattagttttacacttcagtttttagagatggggcctcgctttgttgcccaggccgaagggcagtggtatgatcatagctctctgcagcctcaaacttctgggctcaagtgatcatccctcctaagcatcctcggtagctgggactataggtgtgcaccgcagcccttcagttttcttattgcttttcccaaaacttacagcaactttttttttctttttggatacagggtctcactatgtcacccaggctggagtgcagtggcgcaatctcagttcactgcaaccttcgcctcccagactcaagcaatctcacctcagccctccaagtagctgggactacaggcatgtgccaccacacctggctaatttttgtattttttttgtagagagaacgtttcgccatgttgtctaggctagtctcgaactcctgggctcaaacaatccacccaccttagcctcccaaagtgctgggaattccaggcatgagccagcatgcccagcctacagcatctttcaagaaaagtataaaagaagttgggagataccatcttaaacattatgtaagatgttaacatttggagaatctaggtgaaggagtacatggtaatttttatactatttttcaacttttaagctttcattggacatatttaaaaatccatagtttttcatcttcctcctataatggcaaagagaagaaaactgactacagaagacatttcagaggaactagtagatgaatgctgtgtgacagtagtactctagactgttaggatgacggtaaagttatataaaccaagttgtaaaataagagtcttcagccaggcatggtggcgtgcacctgtaatcctagcatctcgggaggctgagatgggaggatcacttgagcccagtacttcaaaaccaggctgggcaacatagcaagattctgtctccacccatatacatatgtgactgtaccctagatgagtttagaatgtgattttttttttttttttttttttgagacagagttttgctcttattgcccaggctagagtgccatggcacaatctcggctcaccgcaacctccgcctcctgggttcaagggattctcctgccttagcctcccaagtagctgggattacaggcatgtaccaccatgcctggctaattttttgtatttttagtaaaagatggggtttctccatgttggtcaggctggtcttgaactcccaacctcaggtgatccacctgccttggcctcccaaagtgctgggattacagtcgtgagccaccatgcccagcggtgaatttttttttttttttttttttttttaaagatgggatctatctcactatgttgcccaggctggatttaaattcctgagctcaagctgttctcctgcttcagttcccccaagtaactggcactataggcatccagctagaatgtgattttctttttataagaatcagaactgggctgggtgcagtggcatatgcctgcaatcccaccttcttgggaggctgaggtgggaggatcgcttgagcccagacgttcgagaccagcctgggcaacatagtgagaccccatttctatttttaagaaatgaaaaaaaaaaacaatcaaaaccactgcactttgccaaaaagatgtatgatagtattctttcatctttcaagatatttgtacaccaaaacttagttgatgcagtttgtaagtggacaggtgccaaagttacgtatatgtataaagatggttagaaggaaaaattatgtaaaaatgaaaaaaaaaatcagttttttttttttttttttttttttttttttttttgagacagagtctcactcttgttacccaggctggagtgcagtggcatggtctttgctcactgcaacctctgcctcctgggttcaagcgattctcctgcctcagcctcccgagtagctgggactacgggtgcgtgccactgcacccrgctaattttttgtagttttggtacagatggggtttcaccgttttagccaggatggtctcaatctcctgacctcgtgatccacccgcctcggcctctgagagtgctgggattagaggcaagagccacacgctcagcctggattgttcattctgattgacatttattagtctaaaaatgagaatgcttatgattatggagcaaagaagatgactgttctctccaacaaaattatgaagtgagttttcaaagtatttcatttgatgggcagaaagggaaaaaaagacccagaggtgataagctagaaccttactagagctgtacctgaaacctggaatcaaaatttacaaaatggaagccaagcgtggtggtgtgtacctgtttacagagtggaagccaagtgtagtggtatacaccagctactcgggaggctgaggccaggaggatcgcttgtggccaggagttcaagaccggcctgtgcaatgtagggagaccctgtctctaaaaaaaatttttttcttattagccactctgtagtcccagctacttaggaagctgaggtgggaggattgtttgagcccagcagtctgtaatgagctatgatcatgccactgtactctagcctgggcaatagagcaagaccctgttttttttttattttgttttttgtttttttgagacggagtctggctctgttgcccacgctggagtgtagtggcgagatctcggtcaacctccacctcccaagttcaagcaattctactgactcagcttcctgagtagctgggattataggcacacgccaccatgcccggctaatttttttgtatttttagtagagatggggtttcaccatgttggctaggctggtcttgagctcctcacctcacgtgatctacccgacttggcctcccaaagtactgagattacaggcgtgagccactgcacctggccaaccctgtttctttttcttgttcttttttttttttttttttttgagacagagtcttcgctctgtcacccaggctggagtgcagtggcgcgatctcagctcactgcaagctctgccttccaggttcacgccattctcctgcctcagcctcccgagcagctgggactacaggcgcctgccaccacgcctggctaattttttgtatttttggtaaagacggggcttcaccttgttagccaggatggtctcgatctcctgacctcgtaatccgcctgccttggccttccaaagtgctgggattacaggcatgagnnnnnnnnnnnnnnnnnnnnnnnnnnnnnnnnnnnnnnnnnnnnnnnnnnnnnnnnnnnnnnnnnnnnnnnnnnnnnnnnnnnnnnnnnnnnnnnnnnnnnnnnnnnnnnnnnnnnnnnnnnnnnnnnnnnnnnnnnnnnnnnnnnnnnnnnnnnnnnnnnnnnnnnnnnnnnnnnnnnnnnnnnnnnnnnnnnnnnnnnnnnnnnnnnnnnnnnnnnnnnnnnnnnnnnnnnnnnnnnnnnnnnnnnnnnnnnnnnnnnnnnnnnnnnnnnnnnnnnnnnnnnnnnnnnnnnnnnnnnnnnnnnnnnnnnnnnnnnnnnnnnnnnnnnnnnnnnnnnnnnnnnnnnnnnnnnnnnnnnnnnnnnnnnnnnnnnnnnnnnnnnnnnnnnnnnnnnnnnnnnnnnnnnnnnnnnnnnnnnnnnnnnnnnnnnnnnnnnnnnnnnnnnnnnnnnnnnnnnnnnnnnnnnnnnnnnnnnnnnnnnnnnnnnnnnnnnnnnnnnnnnnnnnnnnnnnnnnnnnnnnnnnnnnnnnnnnnnnnnnnnnnnnnnnnnnnnnnnnnnnnnnnnnnnnnnnnnnnnnnnnnnnnnnnnnnnnnnnnnnnnnnnnnnnnnnnnnnnnnnnnnnnnnnnnnnnnnnnnnnnnnnnnnnnnnnnnnnnnnnnnnnnnnnnnnnnnnnnnnnnnnnnnnnnnnnnnnnnnnnnnnnnnnnnnnnnnnnnnnnnnnnnnnnnnnnnnnnnnnnnnnnnnnnnnnnnnnnnnnnnnnnnnnnnnnnnnnnnnnnnnnnnnnnnnnnnnnnnnnnnnnnnnnnnnnnnnnnnnnnnnnnnnnnnnnnnnnnnnnnnnnnnnnnnnnnnnnnnnnnnnnnnnnnnnnnnnnnnnnnnnnnnnnnnnnnnnnnnnnnnnnnnnnnnnnnnnnnnnnnnnnnnnnnnnnnnnnnnnnnnnnnnnnnnnnnnnnnnnnnnnnnnnnnnnnnnnnnnnnnnnnnnnnnnnnnnnnnnnnnnnnnnnnnnnnnnnnnnnnnnnnnnnnnnnnnnnnnnnnnnnnnnnnnnnnnnnnnnnnnnnnnnnnnnnnnnnnnnnnnnnnnnnnnnnnnnnnnnnnnnnnnnnnnnnnnnnnnnnnnnnnnnnnnnnnnnnnnnnnnnnnnnnnnnnnnnnnnnnnnnnnnnnnnnnnnnnnnnnnnnnnnnnnnnnnnnnnnnnnnnnnnnnnnnnnnnnnnnnnnnnnnnnnnnnnnnnnnnnnnnnnnnnnnnnnnnnnnnnnnnnnnnnnnnnnnnnnnnnnnnnnncggagcttgcagtgagccaagatcacgccactgcgctccagcctgggtgacagagcaagactctgtctcaaaaaaaaaaaaaagatatgtgacagttggggttatgattaaacttaggtttctcagtcttcacacactgttgacattttgggccaaataatttgttgtgaggagactgtcgtgtgcattgtaggatgtttgacaacatccttttactctatctgtgagatatcagtagcattccatcttcccgagttgtgacaaccaaaaatgtcttccatcattactacatgtgcccttgggaggcagaatctcccctagttgaggaccactgcattagaagaatataaaaactgagttcaaaggaggcttggatattagatctaatggtgtcttttgagaagagctggttgttaatttttccaagcaataattctaatcaatatatgaaatctaaatagagtgcctttcattctgtaatagattctttcttagcagatttaaaaccagaggtggacttttggacaaattttgaattagactactcaaaattgcactgggttgaagtttacattgacttaatactgcgatggaagtttgcttttgaagagaaactttccattgtttcaagaatatgcatttaaaaataagcaaaaaagagtatgcatttatttattttattttttgttctaagagtatgcatttaaacaaactgaccaggatagacttttgtttttttgagacagggtcttattccatcacccatgctggagtgcagtggcataatcacagctcactgtagcctcaacctcccaggctcaaatgatcctcccacctcagcctcctaagcagcaaggactacaggtgctcactaccatgcccagctaatttttaataaaatttttttgtagagacggtgtctcactttgttgcccaggctcatctcaaactcctggcctcaagcaatcctcccaccacggcctcccaaagtgctaggattacaaatgtgagctgctacacccagcatcccacccgtttttttttgtttgttttgttttttgagacggagagccttgttctgtcaaccaggctggaatgcggtggcgcgatctcagctcactgcaccctccgcaccctgggttcaagcgattcttgtgtctcagcttcctgagtagctgggattacaggcacccacaaccacacccggctaatttgtttttcgtgctttagtaaagacagagtttcgccatgttggccaggctggttttgaactcctgacctcaagtgatccgcctgcctcagcctcccacagtgctaggattacaggtgtgaaccaccgcgcccagttttattataacacatggccaggtgacttttaggacctgtaggtgttttttttgtrtgtgtgtatttgggatcttcctctgtcgctcaggctggagtgcagtggtgcaatcttgcttaatctaacctccacctcctggcctcaaatgatccttcctcctcagtcacccagagtgctggaattacaggtgcaagccactgtgcccaccaggtgacctttaaatgttctgctgccattatttagtcttctctccatagtttctatacgtcaaagtgctttttttttctttttataatgtcttcctagactagagttctgatagtactataaactccaaatttgaaacagatggagatcaaccatgttggctgaagcgggacttgacagtacttttgtggctgactttgtggttccatcgtttggctttctttatattctagaattacactgtacccctctgcaagcgtggttttacagtcttgtccaatgtttctactttagattgttcatattccaaggaggaagaatttaacctcttgctcttttagtcaggtatgtgaccttgaataagtcatttaatttgagtatcagtttccctcaaaaaaagaggggtctggctgggcgcagtggctcatgcctataatctcagcactttgggaggccaagacaggaggattgtttgaggccaggagttggagaccagcctgggcagcatatcgagaccctgtctctacaaaaaatacaaaagttagatatggtggcgctgcctatgtcccagctacttgggaggctgaggtgggaggattacttgagcccaggaggttggggatgcggtgagccgtgatagccctgctgcactccagcctggtggacataatggtatgctattgcaaaaaaaaaaaaaagggttctgggactgcctatctgacaggattgttgcgaggaggacatcagctgatagcagtcatacatggaagacttggctgttgtcggggaggaaatctctggctcagtgctggacttctaaccctccgcacagggccaggcatgtcttaagcacttgctaattatttgtgggatgaatgacttggcaaagattgtaaataactattgcctgcaagtctaaacttactattttaatttcatgctctatacccctgtgttctaattcatctctaattttcaagatgtagctgaatatttacctttatagagtcttcccaagtgtacctgtctgtatccctttcccaatttatagtacttattttttccactcaagagctggtttgtattgttggcttttcttcctgtttttttttttcctaatcctcagaacctgtggatgtttttttccaagactttatcaagaaaatttccaaatacacaacaaagttgatagaattttagtaaatataatgaacacccatatacacactacctagattttaccattatcatttttctactactaggtttaacatatgcctgtccatctatccatcgctccatcaatgaatctgattttttgatgtatttcaaaataaattgcagacattagtatacttcatctaagcacttgagcatgtttatcattatctagagtttaatattgtttatagcatttttcttttttgtccaggctcgagtgcagtagcgagatctcagctcacctcagcctctgtctcctggactcacatgatcctcccacgtcagcctcctaaatagctgggattacaggtacatgccaccatgcatggctaattttgtattttttgtagagatggagtctcgccatgttgcccaggctggtcttgaactcctgtgctcaagaggtccgcctgcctcggcctcccaaagtgctgggattacaggcactttgtgagccattgtgcctggctagcatgttttttctttgtctttttcttttttgttttttttgtttttttttttgagacagagtctcactctgttgcccaggccggagtgcagtgacgttatcactgctcactacaaccttgcagcctcaacttctgaggtcaagagatccttccacttcagtcactggagtagctagtaccatagttgtgcgccaccacttccagctaattgtttctttattttgtagagacagggtcatcccattgttgcccaggctggtctccagctcctgggctcaagccatccttgagcctcagcttcccaaagtgttgggattacaggcatgaatcactgtgcccaggcacatttttctttcaatgcaaattttacatacaatgaaatgtacaaatctttagtacattttgtatgtgtatatatacatacatgagatcatgctgtatgtattctatagcttactgttttcttcttctttttttttttttttttgagacgtagtttcactcttgttgcccaggctggagtgcagtggcgccatcttggctcacctcaacctctacctcctgggttcgagtgattctcctgcctcagcctcctgagtaactgggattacaggcatgcgccaccacgcccagctaatatttgtgtttttagtagagacagggtttctccatgttggtcaggttggtctcgaactcccaaactcaggtgatccacccgcctcggcctcccaragtgctgggattataagcgtaagccactgcatccggcctagcctgctgttttcacttaatatgtcttagagttcattctttgtacttgtggataaaccctgatctttctgattcctacatagttttccataatatgcatgatcacatttatttagctgatagatatttagattttcatattttgctgcaataaatatactcagcagatgtgtaggatacaggcctgaaagtggaattgatagtttcagtattccaaaatctagtatgttttagagttcatttcttatactcgtggataaactttgatctgattcttacatagttttccataatatgcatgggatgggtatgcacatttaaaattttaataaatacctacaagttgccagctaaataggctgtaccaattaaagcctcctccatcagtgtttccctgtatccttacccacactgtcatcttttttttttttaaattgctttggagtaaattacttttttttttcttgaggcggagttttgctcttgttgcccaggctggagtgcagtggcgcgatctcggctcactgcagcctctgcctcccaggttcaagcgattttcctgcctcagcctctcgagtagctgggattacaggcatgcaccaccatgcccggctaattttgtgtttttagtagagacagagtttctccatgttgatcaggctggtctcaaactcccgacgtcaggtgatccactcgcctcggcgaaccaaagtgttaggattgcaagtgtgagccacggcgcctgaccttttattttttttttttttgagacagttccactctattgcccaggctggagtgcagtggcgcgatttcggctcactgcaacctccacctcccaggttcaagtgattctcgtgcctcagcctcctgagtagctgggattacaggcgcccacaaccacacccggctaatttttgtatttttagtagagggagggtttcaccatgttggccggtctggtcttgaactcctgacctcaagtgatccgcctgcctcggcctcccaaagcgctgggattacaggcatgagccaccgcgcccggcctactttacacgttttttattactagtgaggctatatatggttttagagggcaagggctgaaatcatctaccaacttcatatctactcactgaacatttgcttttaatgaatgaatgctactaaagcatttctgctttattaggtttaggctgaagaaggatgagttagctaagtgtgtgaaaggttaaaaaaagctgaacttgctccctgcatgtgtgccttaaataagtaaagggattcttccttcacttcttctcttnnnnnnnnnnnnnnnnnnnnnnnnnnnnnnnnnnnnnnnnnnnnnnnnnnnnnnnnnnnnnnnnnnnnnnnnnnnnnnnnnnnnnnnnnnnnnnnnnnnnnnnnnnnnnnnnnnnnnnnnnnnnnnnnnnnnnnnnnnnnnnnnnnnnnnnnnnnnnnnnnnnnnnnnnnnnnnnnnnnnnnnnnnnnnnnnnnnnnnnnnnnnnnnnnnnnnnnnnnnnnnnnnnnnnnnnnnnnnnnnnnnnnnnnnnnnnnnnnnngcctgaaaccaggaggtatgattagagcggaagcaatttatttgagagagagttaggaatagaactttgagtggtaattgtttgtttgtttgtttgttgttgttgtttttgagatggagtcttgctctgtcgcccaggctggagtgcagtggcatgatctcggctcactgcaagctctgcctcccggtccacgccattctcctgcctcagcctcccgagtagctaggactacaggtgcccgccactacgcctggctaattttttgtatttttagtagagacggggtttcaccatgttagccaggatggtctcgatctcctgatctcgtgagccaccacgcccggcctatgagtggtaattgttaaaggaataaagtatggttcagagaaagttcagcctctgtagtgttgtagaggtggtatggaaagcaaactctggaggtggatgaagttaagtaccatatgaaatcccaatcacttaataaaagaaacgatattttaacagccaaaagatagagtatgatatcagaataaaccatagtactgtaatacttaatgtatgaaaagctcactacaatcttctttttccttatagactggttcataaaccagcatttggaaatcactaatgtaggctgatcccctccttttgcccctgtttgaaaacagggccaaaattagaaagcttcatggtagatagagtttggagtagaatccagttcttttttgtttgtttttattttttgccctcaaacattctcccatccaacagaatccagttcttaaaaggtactctagtgttttttctatagtcgtgccgtgctcttcacatctgattttggcttattatttataaagtttttttttgttgttgttattttttgagacagtcgcgctgtcccccagcctggggtgcagtggtgcgaatttgctcactgcaacctccgcctcccaggttcaagcgattctcccgtctcagcgtcccaagtagctgggattacagatgcgtgccatcatgcccagctaattttgtatttttagtagagactgggtttcaccatgttggcctggctggtctcgaactcctgacttcaggtgatccacccacctcggccttccaaagtgctgggattacgggtgtgagccactgtgaccagcctatgaagtttttgttttttaaacccagtgctgccctatcataacatttctataattttttttttttttttttttttgagacagagtctcagtctgttgcccaggctggagtgcagtggtgggacctcccctcatgcaacctctgcctcctggattctagcgattctcatgcctcagcctcccaagtagcaggttttacaggtgtgcgccatcacacctggctaatttttgtatttttactggagacagggtttcaccatgttggccaggctggtcccaaactcccgaccttaggtgatctgcctgcctcagcctcccaaagtgctgggattacaggtgtgagccactgcatccggccaataaagtattgacttcatttttggttacagaggttaatctcmgatgagttaagcatcagttttaaaccaacagaacccaagaccaaaccactgaaagtcatgaacgtatataagaaatagctaaaaagacattttactctacctgtgattagactcagttcctcatcccaaaacacgctgaggtttagtgttcgtagttgattagtggcaaataacatgcataaatctatatactcaacctcttaatatgtctaaaaggtttttgaatactaagctaaacatgctatttcatgctagaaaaacataggaaagcataactagctaagacattttaaattatttgtcctcagcagctgtcagaaacgttctcaactccatttaactgagttccacatattatcacacacaaagctgagagacttagtctgaagttatataggccacagagagcatatttgtggcttgagtttacaaatagataaaagtagccagcttgcaaattaatgggttgtgctgctgtgtcagggtcccacttaggtatgtgaaatgtgagaaaaacctgagacaggatttcagagctaaggattagagtggcaggcagattgaggactatagtgaggacaaagaaaaggtgaaacagccatggagagtccttgtaaagactactttcccttcagggcttgtgtgctcccagaggataaagaaaagatcttgggtagacttatgaattaggtaaagattttttttttttttaacttaaccgtatttcagatgagggggtggcttgccaaatctcccactattactgtaaattttatcttctttccatagcagtggtatcttatttaagagatttttttgggactggaaaagtggtggggccttttttctttggatggctgattcattctttctcactgatggtgtgttatgcttgtgttagtgatactgatatggaaaagctctgaagacccaagtagattactgggccaagtagattactgtgtcctgcaggaatgaaattgtctcccacggaggtattattaagctaagagaatctcttcttataactgttaaaaccagaagaaaatttaggagtgatctgttccaacttttcttattttatagttggagaaactgaaattcacatagaatgaggaacttgttgaagttacgtagcatcttaaattggcaagtctagaatctttgtcttcccattcctggcacggtattctttccatgataccattataattgttgaaacaaattttaaattagaccacaattatagtagtaggttttgagaggatttaagaagaagcacttgaggccgggcgcggtggctcacgcctgtaatcccagcactttgggaggctgaggcggatggatcacaaggtcaggagatcgagaccatcctggctaacacggtgaaaccccgtctctactaagaatgcaaaaaaagtagccgggtgtggtggcgggtgcctgtagtcccagctactcgggaggctgaggcaggagaatggcgtgaacccgggaggtggatcttgcagtgagccgagatggcaccactgcactcagcctgggcaacagagtgagactccgtctcaaaaaaaaaaagaagaagcacttgaatatttttgcagcatgtagatatgtaattaatattaggagtgatagcatttgaggagaaaactagagaataaagggaaacaaggttgtgtttatatttttaaattggagcgtatttttcaacttcataataccaaattaattaaaattatgttatttaaatatttgtctttttcagttataacttgttcactgtgttggggggtggtatgcccacatgcacttaaacttcatcactaagatgaaatagatgatcagttctgggagtcaagcttttactaaacttgggtgactggtcctaagtggcgtacatcatactggagtgagaattgacttgcatgctattgcttttggtttctgcaggttttgtagtgcatccctgagcatgagcacagaatgaaccggcgtttggatgaccaggagtcaccggtgtatgcagcccagcagcgtcggatccctggcagcacagaggcttttcctcaccagcaccgggtgcttgcccctgcccctcctgtgtatgaagcagtgtctgagaccatgcagtcagctacgggaattcagtactctgtaacacccagctaccaggtaagctggagccaaccaagggactagaatgagggaagagaaatagtggttttaggcaattataaaactttttttaatactgtgttagatattaaaaattgttgagtatgtgtaaggtaaaaaaaaaaataactgtgtactcaccatacaagtttttaaaaaaagaatgttgtcatgacctttgaagttccctgcgtatcccactctgctcccttcttttccctcccttcagaggtagccactgatctaaactttgtatttatcattcccttgactttatttacttaaaaaaactaacataattgtttagtttcggtatttttgaacttttatataaatggaaacattttcttctttgactcactttgttttaaaaaccccatatttttatagatcgctgtaattccaccattttcactgtagtgtaaattacatgcatatactcaatttatttgtcaattctactgttggactattgggctgtttccaggtttttgcttttacaaaggtgctgctgtgaacattgtgatattgtcttagtgcactcagtggcaattcatgacaaaataagaagcttgtgccagaatttaaatcaacgcacttattaagacagttttgctatttatttttaaaaaagacagctgaattaaacatcattgtagtgaaatatggctgactcttggacagtgtgggggttgaggcactgacttccccccatgcagtcaaaaatacatgtataacttttttcctttttctttttttaggagatagtgtcttgctctgtggcccctgttggggtgtagtggtgcgatcatgactcactgcagcctcaaactcttgggctcaagcagtcctcccgtgccctagcctccctagtagctaggactacaggtgcacaccaccatgcctggctaatttttatgatttttgtagagatgaggtgttgctgtgttgctcaggctggtcctaaactcttggcccaaagctatcctcccccmgccagcctcccaaagagctgggattacaagtctgagccactgcgtctggccaatgtataatttttgactcccctaaaacttaaatacaaatagcctattgtccagaagctttaccgataacataaatggttgattagcatgtattttgtatatttgtcatatactatattcttaaaataatctagaagaaacaaaatactaagaaaatcataaggaagagaaaatatatctaccatttattaagtggaagtggatcatcataaaggtcttcatccttgtcttcacattgaggaggctgaggaggagggagaaagaagatgaagggttagtctggccatctcagggttggcagaggtgggagaaaatccatgtataagtggacttgtgttgttgctgagtgcagtggctcgcacccataatcccaacagttggcgaagttggaagcatgaggattgcctgagcccaggagtttgagatcagcctgggcaacatagcaagccccgtctctcctaaaaataaagattagcagggcgtaatggtgcacacttgtgttcctagctacttgggaggctgaggtgagaggatcatttgagcctgggaggttgaggctccagtgaatatgcttccgcacccagcgtgggtgacagagtgtgaacttgtctcaaaaagaaagaattaattaattaatttgaaaaaataaataaaaaattagccaggcatagtggtgtgcatctgtagtcctagctacccgggagactgaggtgagaggattgctcaagcccaggaagtcaaggctgcagtgagctgtgatcaagcaactgtacttcagactggacaacagtgcaagaccctgtctccttaaaaacaaaacaaaaacccgtgttattcaagggtctaccatcgttggtttacattgtggtgcaaactccttaacctgttggaaaccagtcagcaggtttgaggacatacaagagtttgtcaagtacctatgaaagggattgctgtgtcacagggtatatgcatctttagcaagttcccccaagcattgtatattcctgttctatgtcctgaccaacactgatcattcatctgttactctgttttgtagaagtgaagaaatttggtttttgcccttttttattatgaaagtaatgtatcactttggtttttttattttttattttattcwtttatttatttatttatttatttattttgagatggagtttcgctcttatcacccaggctggagtgcagtggtgcgatctcrgcccactgcaacctctgcctcccgggctcaagtgattctcctgcctcagcctcccgagtagctgggattacgtgcacctgctgccatgcctggctaattttttgtgtttttagtagagatggggtttcgccatgtgggccagactggtctcgaactcctgacctcaggtgatctgcccctcttggccttccaaagtaccgggattacaggtgtgagccaccacgcctagcctattttatttatttatttatttatttttgagacagactctctgtctgttgcccaggctggagtgcaatggttcagtcttggctcagtgcagcctctgccttctaggttgaagcgattctcttgcctcagcctcccgagtagctgggattacaggcgtgcaccaccacgcccagctaatttttgtatttttagtggagatggggtttcgctgtgctggccaggctggtcttgacctcaggtgatccgcctgtctgccttccaaagtgctgggattacaggcgtgagccactgcacccggccttattttatttttttgagatggtgtctcgctctgtcgccccagctggagtgcagtggcgtgatcttggctcactgcaacctctggcttccaggttcaagtgattctcatgccccagcctcttgagtcgctgggattacaggcgcaagccaccatgcccggctaatttttgtatttttagtagagacagggttttgccatgttgggcaggctggtcttaaactcctggttttaagtgatctgcctgccttgacctcccaaagtgctgggattacaggtgtgagccactgcaccctgccacactttgatttttttttaaaaaaaggatataaaatgactttttttctgtcacacctcagattttctcccactggtgaatttcttgggtatccagttttatatgcatatacaagctcatctatatcaacctgtctagctatctaaatttacttttttttttgagacagagtcacactctcgcccaggctggaaggctgtggcatgatctcagctcactgcacccttcacctcctgggctcaagcaatcctagcacctcagtctcccaagtagttgggactacaggtgcatgccaccacacctggctaatttttgtattttttctatagagacagagtttcaccatgtttcccaggctggtcttgaactcttggactcaagtgatctgcccgactcggcctcccaaactgctaggattacaggcatgagccacctcgtccgccctttctgcttttctttttgtacaatgtggatcatacattacatactattgtgctgtttgctcttttcatttaatatatagtggatatctttctacttcagcatataactggtctggggaggccttcaacctcatttgttagtgaccttaaaaatgtacggctggtaatgggaatataaactgacgtaatcttttttgagagcaatttggcagtttgtgtcagatggttttgttagtttttgacctggcaattccatttctaggaatttagtataaaaatataaagaagaggaaatgcagctgaagtaggaaatggtgattmcttaggtgtcactcttcctcaggagtccccttgaggctgtctaatcccttcctgtggggctggggcagcagtcagaagactgccaacagatggcatcttttaggacttggaagaaaaaaaagttgcttgtttaccttgggtgattactttcattatctaaacaggttaatgactgttttctacatttgggatagttaaatttcttccgaatggaaactataatgtgtttgtataagtcagtctagtgaaagcctgtaaaccctgtaaaaaacatgcatgttggaatacagaagctcagaatactagcccatctttgaggtacattagagcttttagaattgtctaaatagtttctttttactcttaatacaccttgttttgtttctgtggatttatgcatagttgcttggtttctccctctccctcatttcttcatctccctccaggataatttttataaaagtgaggatttgaaaaaaagttttattctctcttaaattgtggtataaaacttaacattgtttagagaaagaaagtttcatgttatttagtctccttattttggggatggggcatttgggcatttggacagattgttgtcttctgtggtgatcaacaattctgaaaaaggaaaaaagttctgaaaaaaattttgtagcatttcttgaaatagatatagaaggaaagtagttttggcttttatttcctcaaacttgtaagaggacaggagaaagactgagataaaagaatagaaaagacatttgtttgaggccaaaccatcaagaattagggggaaaaaatttattttacattagatacagtgctcgtagcaaatcaagataagcaaaataagccaagtaggccaggcgcggtggctcacacctgtaatcccagcactttgggagcccaagacgggtggatcatttgaggtcaggagttcgacaccagtctaaccagggtgaaaccctgtctctactaaaaatacaaaaattagctgggcatggtggcaggcacctgtaatcccagctactcaggaggctaaggcaggagaatcgcttgaacctgggaggcacaggttgcagtgagccgaaattgtgctannnnnnnnnnnnnnnnnnnnnnnnnnnnnnnnnnnnnnnnnnnnnnnnnnnnnnnnnnnnnnnnnnnnnnnnnnnnnnnnnnnnnnnnnnnnnnnnnnnnnnnnnnnnnnnnnnnnnnnnnnnnnnnnnnnnnnnnnnnnnnnnnnnnnnnnnnnnnnnnnnnnnnnnnnnnnnnnnnnnnnnnnnnnnnnnnnnnnnnnnnnnnnnnnnnnnnnnnnnnnnnnnnnnnnnnnnnnnnnnnnnnnnnnnnnnnnnnnnnnnnnnnnnnnnnnnnnnnnnnnnnnnnnnnnnnnnnnnnnnnnnnnnnnnnnnnnnnnnnnnnnnnnnnnnnnnnnnnnnnnnnnnnnnnnnnnnnnnnnnnnnnnnnnnnnnnnnnnnnnnnnnnnnnnnnnnnnnnnnnnnnnnnnnnnnnnnnnnnnnnnnnnnnnnnnnnnnnnnnnnnnnnnnnnnnnnnnnnnnnnnnnnnnnnnnnnnnnnnnnnnnnnnnnnnnnnnnnnnnnnnnnnnnnnnnnnnnnnnnnnnnnnnnnnnnnnnnnnnnnnnnnnnnnnnnnnnnnnnnnnnnnnnnnnnnnnnnnnnnnnnnnnnnnnnnnnnnnnnnnnnnnnnnnnnnnnnnnnnnnnnnnnnnnnnnnnnnnnnnnnnnnnnnnnnnnnnnnnnnnnnnnnnnnnnnnnnnnnnnnnnnnnnnnnnnnnnnnnnnnnnnnnnnnnnnnnnnnnnnnnnnnnnnnnnnnnnnnnnnnnnnnnnnnnnnnnnnnnnnnnnnnnnnnnnnnnnnnnnnnnnnnnnnnnnnnnnnnnnnnnnnnnnnnnnnnnnnnnnnnnnnnnnnnnnnnnnnnnnnnnnnnnnnnnnnnnnnnnnnnnnnnnnnnnnnnnnnnnnnnnnnnnnnnnnnnnnnnnnnnnnnnnnnnnnnnnnnnnnnnnnnnnnnnnnnnnnnnnnnnnnnnnnnnnnnnnnnnnnnnnnnnnnnnnnnnnnnnnnnnnnnnnnnnnnnnnnnnnnnnnnnnnnnnnnnnnnnnnnnnnnnnnnnnnnnnnnnnnnnnnnnnnnnnnnnnnnnnactatataattttttttcttctttttggagacagagtcttgctctgttttctaggctggaatgcagtggcatgatctcagctcactgcaacctccacctcccaggttcaagtgattaccgtgcctcagcctctcagtagctgggattacagatgcgtgttaccacgtccagctattttttttggtattttcagtagagacagggtcttaccatgttggccaggctggtctcaagctcctgaactcaagtgatctgtctgcctgggcctcccaaagtgctggttacaggtgtgagacactgttcccagctaaactatatatatatttttttgtttgtttgtttttgagatggagtcttgctttgtcgtgcaggctggattgcagtggcacgatcttggctcactgcaagctccgcctcctgggttcacgctattctcctgcctcagcctcccgagtagctgggactrtaggtgcccgccaacacgcctggttaattttttgtatttttagtagagacggggtttcaccatgctagccaggatggtctcgatctcctgacctcgtgatccgcctgcattggcctctcaaagtgctgggattacaggcatgagccaccgtgcccggctatataatttttaatagctacaaataattttgttataactttggtgggctgtaatttatttaaccagttccttttgtggaaaatttgggtttctttctttttcttttctttctttttttttagagacggtctcattctgtcacctgggctagagagcagtggtgtgatcacagctcactgcagccttgaactcctggactcaagcaatcctcctcctttagcctctggagtaggtgggaccacaggtgcatgttgccatgcctggccaagtttttattttttgtggagatgggtgtcactatgttgcccaggctttcttttctctttttagagacgtggtctcactctgtggcccaagctggaatgcagtggcatgatcatagctcactgcagccttgaactcctgagttcaggcgatcttcctatgtaggtgagataggtgtgagccatcacgcccagcagaaatttgggtttccaattaattatctttgtgcatttgtgttagttatttagactcatttggggaagaatgtacaagccttgaagtttcctgtctgtattttgttcaccccaggtttcagccatgccacagagctccggcagtcatgggcccgctatagcagcagttcatagcagccatcatcacccaacagcggtgcagccccacggaggccaggtggtccagagtcatgctcatccagccccaccagttgcaccagtgcagggacagcagcaatttcagaggctgaaggtggtattcagctctttttcttgggtcaaaaaatttatctttagcaggaaatactggttgcagcttgttggttgtggtggtacaacttctaacctgagatactagctgtcgaatcacaagttttaccgtttttgttttgtgaaatttgcttatgtttcctatcttggcatcagtgcctgatccagagaagaatatactcaaatgtttgtggactgtatgaatgcatgtcggtcaaatgttatcaggattgtggggccattttaatacaaaataaaccttaaaattcattttttggctgcttccttttgaactctctattgagcacatatatgattggctacaggttagtacagtaaattggcccagtaatatatcttacagttcaatctttttaaattcttaaaaatttttttttttagtttttagtttcagagatgggagtctcactgtgttccccaggctggtctcaaactgctggcctcaagtgattctcccatcttggccttcgaaagtgttgggattacaggtgcgagccactatgcccagctcatgcctgtaatgttcttattacctttatctttttattcctgtttatgaatagctgaattgactcacatcatcaagtccattcttagtaaaacacatgctcctttttggggggaatctttataaagttcagggaaaactgtaactgtgaatgaattatcagtgttttcatattttctgctgagtatgtgtggtacgttttcagtgctttgaaattcatgaggcatccctggagaagtgaagcttgtgttcccagctaaccttgtatctctgaccacttgaatgttacttttcaaaatatgtgattgttgcagcaagtgttcaggtttcaatttttctaattttacgtttatataaaattaagttcaggaaataataaatggaggaactctgaagagatgttaaatcttcatttggttattgcaacctacttatgttgcttgcaggcacgaatgagaaataaaccctctaaggacatatccatatgcagcaaatagttgtttcttctgttttccctgatacttactttagttcttcttgatccctgccctcgttggtgtggattcttgggaacttgtttaatattggcctaagagtattaaatgctacataaatattataaagtacagcaaagctatgtgatttagagtaattttgtaaaatttactctctatattggcttacatagtattgactaatgcatagccttttaaagagagtacaggttttttaggcctgaagcttcactctggattctgtctttgggaaaatgtgtataaggaatattgatgtttcctttaaaacattttcagtctgttgtagagtgatggctgtgtaccaaaatgtattattgctgcgggcttagcactttactaagtcctgaaaatattttttttaaaacttggttgtgcgtgatttaattctgtattaacactgtatattcagtagttatactttaatgttgcaaaatagcttataaacttgcttattaaactaacaaaaacatatgtatttctatagcctttttcaatcaaccctatcaaagcacaacaccagtttttacccaccttcctcacaggactctttggtataagtatatggattatgttttgtttgctttatggaaactggcaaggaaacaaggaaaggttttggatttggggttatagagtgagtcatagatagagttaggatttcttgttgtgttcttttagtcacaagctcttgactatattcctgcataaaataacttgttgaatttcctttctgatgaggagaggtaaaatgcttcttgtacctccatgtaatttaactcagtattcccacattgcctgtcatttttggatcagtcttaaaatgcattacaagcatttgaatcaacttcaataaatcatttatattctataataatgtaggccgggcatggtggcttacacctgtaatcccagcactttgggaggccgaggtgggtggatcacctgaggtcaggagttcaagaccagcctgacmaatgtgatgaaaccatgcctctactaaaaatacaaaatgagccaggcatggtggcgcatgcctgtaataatcccagctactcaggaggctgaggcaggagaatcgttggaacccaggaggcagagattgcagtaagccaagatcataccactgcactcgagtctgggcgacaagagtgaaactccgtctcagaaaaaacaaacaaaaaaaaagaaatgttcagtgagaatgcttacacattatttcaagcctcaacattgtcttttttttttgttttttgtctttggtagattggtggtgacaagaagggatttgaacgatttgaggcatgtttggtgttatttagttattgaatgtcagcagcagtgatatttggtacatatttagcaggttatctttacagttgcttgtgtttttctctcccaacaagattgtagacttcaggagattcrgggccttaatagtaaatccctgttgaagtgagctaagaaactttatcagcagagtctaagggtctccccaagtgcttccttaaatctgtagcttctaaataactacatccaagttttttttttaagttgtgctacctagaactgtatacatgcatttatagagagtttatataagagttggactatgctttaggtgatgagagaatttcctcactatttttacatgtaggtgtcttatttattatgtgagtgtcatgcagagtttttaaagcataggattattctataacttttattttacttttttgtttttttgagacagagtctcactctgctgcccaggctgtagtgcagtggcgccatctcaactcactgcaccctcccctgcctgggttcaagtgattcttatgcctcagtctcccaaatagctgggattacaggcatgcaccaccaagcctaatttttgtatttttttttttttttactaggacggggtttttccatgttagccaggctgctctcaaactcctggcctcaagggatccaccctccttggcctcccagagtactaggattacaggcatgagccaccacaccctggcctataactaatttttaaacagtggtttgcttggtttgctgtgactttcagtacctttttgtttcagacatatacatatcacacataattgctttcttttgggtttctgtactttttccgtctctgcagtagttaccttataccataccatgtcttattgataactgttcttttgttgtgtaatgatgcatgctattcttaaatatcttccaaagtcttggttccttttgcaaacttaatatattttgtgttcacttaagttggtcattaatgaaacattttagtatggaaagttcagaatatgaattaaaatagtccattgaatttcaacagaaattgtcatgatatttgtatagaaaaactaaccatcaaacaagtgggtattgaccaactatacaatctgatttctagcaacaccgaaacactgattaaccatggccgtaatggaagtctgaagaactcttaaacagccatttgtctcggggccgggtgcggtggctcacgcctgtaatcctagcactttaagaggccgaggcgggcagatcacgaggtcaggagatcgagaccatcctggctaacacagtgaaatcccgtctctactaaaaatagaaaaaaaaattagccggccgtggtggcgggcgcctgtagtcccagctacttgggaggctgaggcaggagaatggcgtgaacccgggaggcagagcttgcggtgagccgggaaagcgccactgcactccagcctgggcgatagagcgagactctgtctcaaaaaaaacaaaaacaaaaaagcggccatttgtctcaatccattagtgctgctataacaaaatacctgagactgtataatctaaataatagcagtttatttctcacagttctggagaagttctgggggctgggaaatctaaaatcaaggtgctggccgggtgcggtggctcacgcctataatcccagcactttgggaggctgaggagggcagatcatttgaagtcaggagttcaagaccagcctggccaacatggtaaaactaccgaagatacaaaaaaatgagccaggcatgatggcatgcacctgtaatcccagttactctggaggctgaggcacgagaatcgcttgaactcaggaggtggaagttgcagtgagccgaatttgtgccactgcactccagcctgggtgacagagtgagaccatgtctcaaaataaataaataggccagacgcagtggcttacgcctgtaatcccagcacgttgggaggccgaggcgggcggatcacgaggtcaggagattgagaccagcctggccaacatggtgacaccccatctctactaaaaatacaaaaattagctgggcgtggtggcaggcgcctataatcccagttactcaagaggctgaggcaggagaatcgcttgaacccgggaggcggaggttgtattgagctgagatcgtgcctttgcactccagcctgggagacaagagcaagacttcatctaaaaaaataataataataataaataaaataaataataaaataaaatccaggtgccagttggtttggtgtctggtgagggcctgaactctgtttttcgagatggtccctgaatgtgtgtccttacactggaagggagaagggccgaagggactaacactggttcactccagcccttttataaggtccctaatcccattcatgagggctccacaatcactttctgaaggcctcacttcttaatatcatcatatcggtgattaagtttcgatgtaagaattttgtgggacacatttcagaccacagcaccagttaatgattgacttgaatgtaaatgttccattttgcaacaaatcaaaagactatctatgcctggccaggtgtggtggctcacatctgtaatcccagcacattgggaggctgaggcaggcggatcagttgaggtcaggagttcaagaccagcctggccaacatggtgaaatcccatctctactaaaaatacaaaaaaattagttggatgtggtgacatgcgcctggaatcccagctactcaggaggctgaggcaggagatatcacttgaacccaggaggcagaagttgcagtgacccgagattgcgccattgcactctagcctgggagacaaaatgagactcccatctcaaaaaaaaaaaaaagaaaaagactggcttaaatcacatcaaatgtttatttctgaaatttcttaaacctgatattttgtataattttaaatatttaggcttcagttaaactaccaaaataaaacttaacgtatctcagagtaaataggaaacacctagtggggatttcttttgggtgtctctgtcctaaatcagactcatagcttagcctttccaacctgttcttctttgtgataggtcagttttttttctcccccagccaaactgtatccagctttaaagatactttccaaaaacagtcatggtatttcaggcagaacatggacaatccttaacaatgagctaccaaaaaaaaaaaagccactataaaacccagtgaagtctcatttgatgctctgaacagggaaagtttagagtgaaggttgacacttcacatttagcatgttgtttaacaacttttcacaagccaaccctgactttcaggaagtgaaatgaaaatggcaggacttatctgaagatccacagtctagaaaaagcaaccactgctcttttgagggctgccatttcagtggcatcactggaaagtttgactgcctgacatattggtaaccagttattgggggttaggtcccaacaggtgtctgggtaaaagggagttaggtctgtgaaggtggggagggagaacaggatgtaaaaatgaatttgtttttccatcccacaaggtgtttgtgccaaggtggccatgtgtgttaaaagtcagggaatctaggctgggtgtggtggctcacgcctgtaatcccaggactttgggaggctgaggctggcagatcacttgtggtcaggagtttgagaccagcctggccaatgtggtgaaatcctgtctgtactaaaaatacaaaaattagccaggcatgctggcgggtgcctgtaaccccagctactcaggaggctgaggcaagagaatcgcttgaaccccggaggcagaggttacagtgagccaagatcgcaccactgcactccagcctgggcaacaatagcaaaactctgtctctaaataaataagtaaataaagtcagggaatttcttctataagccaagaggaagtctctcaaaactagaagggaaaggtgttttccccacgtcagtccagcttcaaagacattctattagtgacctgtgatccttcccaccaaaacaacaatgaagtgttctgtgtgcgataacaacactgctttagaaaaagcaaaacaaaattctgcatttttataaagcttgatttaaacaatggtatttcaaaatttacaaacttcataactttatagttcaaactttacagtcaccagaagtacacagttaccaaaaatgcacatgtttcacttggcatctctagcaccttcagctttctgtgcctggtctgttttggcatctccatttcctgcaaggttattcccctccctgccagtgtcagcattttcctttttccctttgggtacctcctctctctcctttgcaggggactttttttttttttttttttttcctgagaccgagtttcactcttgttgcccaggctggtgtgcaatggcatgatctcgactcaccgcaacctccgcctcctgggttcaagtgattcccctgcctcagcctcccgagtagctggcattacagacatgcgccaccatgcctggctaatttttgtatttttagtaaagatgggtttctccgtgttggtcaggctggtctcgaactcctgacctcagatgatcctcccacctctgcctctgaaagtgctgggattgcaggtgtcagccactgcgcccagcctgcatcctttttagggttgggctctggctttggaggagcaggtttagcatacaaccttgcggatcttctctgggttgttcttcaccttggctctatctcctttagcatccccttcaggctttctcttgggtgtggtggtgatgtggaaggatgtaagcgctgagtgcgggatgcagtggcatgtgggctttgatcggtccgagagtcactcttgactgttcttcctcagtgctccgtggcggatcacttttgaatgctggctctcccttagctcctctattcagtcagttccccaatcctgtcacttctactacccaaaaagcttttttatctatgcagttctctctgttgttctgggccagtactataattcaagccactgttttcacatgagttgtccagttattcctgtagcatacctggtcttcctacctcctttcaatcttttctgctcttgtgccaattttttctcaacactgcagtcaaattgcgtacacgaaaatgcagatgataaaaatctaaattgctttttcacaagatttacaaatcctttcagaatctagatcctgcttttttttctgtctcattttgttacttttccttcctcttcactacagatcctccagccaaactaaactgttttcagatttctaaatatcccatatcgtatcctgtctaggattttacccgtgctgccgcttttgattttcttcactggtcttcacttttgctagcttatagtcatctttaggtctcagtttatacattacctcctggggaagcctcactttttttggtggagaagacgtgtccttcccatgtcatctccaggcatggagtgattaccgggttacccactgtgttatgattcctgactacatacaaacaaatgtctatagacgaggggctacaaattatttgtcattgaatccttggtactcacattgggcctggtatgttgcagtttagtagatacttgtgaaatgaattaataaatgatatatcattgtaattattcttcactgatcattctgttcaaaattttccaaggcaaggctacagattttatgagttgattattattttaagcttgagtttattattggtatccatactaacttttaagtatatatttaatatatttttacttcatttactgcattaagcatacttaggcataaataatttgtttttgttttttttttgtaattatgagcttactttctttttataaccttgatatttatccctgcctcaggtggaggatgcgctatcttatcttgaccaggtgaagctgcagtttggtagtcagcctcaggtctacaatgatttccttgacatcatgaaggaatttaaatctcagaggtaaaagatgtgtgattgtactcaagctttgtatctggcatattgattttggaaggaagaggatatagtttatttactggaagataaaggatgctcctttttgcagctgaattttcaaaatcatgcctttattttatgcatacctttattgatggaaattatggccactagacttttttatccctattggtaaattttccttaactaaattttttccagtgttttgtctcaatcagggaagtagcactgstagtgatttaggctacttggtttctgaattggtttagatacccttatattctggcatggttcactgttgtaagagtgtaactcatctgaacaatgtagatgtgtgctgaaatgatgtatactggtatatcaaagagtgaatcttgtttgggatatgtagctttatatatatcatctgagtatctgcttggtagaattattacaatgaacatatattctgttaaaaattttgaccattccaaaaattagccgggcatggtggcgggtgcctgtaatcccagctacttgggaggctgaggcaggagaattgcttgaacccaggaggcggaggctgcagtgtgccgagattgtgctactgcactccagcctgggcaacagaatgagactctgtctcaaaaaaaaaaaaaacaaattgtggccaagtatctttgagtctaaaactaaatggctttggaatttcagagttcgtgtgttaattttaaaatgcgtagatgatctgttttcctgtttagagaaaacctagtagaaagtgaaattttgagtgaggtggctcatgcctgtaatcccagcactttgggaggccaaggtgggcggatcacctgaggtcaggagttcgagaccagcctggccaacatggtgaaaccccacctgtcctaaaaatacaaaaattagccgggtatggtggcgcatgcctgtaatcccagctacttgggaggctgaggcaggagaatcacttgaactcgggaggtggaggttgcagtgagccaagaccccaagattgcaccattgcagtccagcctgggcaacagagtgagactccgtctcaaaagaaaaaaaaacatgaaattttttcttaacagggtgtttgttaagcttacagtttatcacttttctttttgttttttatcagcatcgacaccccaggagtgattagtcgtgtgtcccagctattcaaaggccaccccgatctgataatgggattcaacaccttcttgccccctggctacaaaattgaggtgcaaaccaatgacatggtgaatgtgacaactcctggccaggttcatcagattcccacccatggcatccagccacagcctcaaccaccaccccaacatccttcccagccttcagcccagtcagccccagctcctgcccagccagctcctcagcccccacctgccaaagtcagcaaggtgagcacttggaaaatattgcatcaatatgaatgcatccctagagagcaccttcctttgatgtttcccctttatataagacttagatactgagaaacaaagttacaaagatttcgtcatagaaaaatgctgtatgaaaacttcactatgacatggttcacatttacacatcacttacttaggtatctatttaaatcaacacagcaacaactttcaaggtctttctttttacagtttctgcttataaaaccatgaacatcccaacaggtggtgactttgtgtagtagtagttgacagcacagatagaaaccatcgtcttatcctggtcaaattgtgctgctgcccacatggttattttatgaaagttatttcactaactagattatatcaagctaagtagaagatctaatgaatagtgatagtgatggtgatgaagatggggtgttcttggtctagaaccacactgtctgacacagtagccactagccacataggactatttaaattaaattcagtttttcatttgcactagctttcaagtgctcagtaacctcatgtggctggtggctatgtataagacagtgcaaataaaggacatttccatcatctcagttctacaggacagagttggcgtagaagacttttttatgtggagctactgcaacagttgtcttgttgttgacatcaaaaggctatgtagaatgagattttttctatgtgtacttgttgagctactaagctaaaacattgcatatgaaaaattcttccctgtaattggagatggctccagttttaaggttttatttagaaaatgtgagactgaaatatttgtatcagcatgtttgaaccgcctacaactcccactgctgcccagtatgatttgtgttggactaaaatgacctggcctgagtgagtaaataaaggatatacgttgacaccttgtttctctttagtttgaactttccttgtatcaactcatctatgcatctgaagagaataaagatttcttttctttctagccctcccaactgcaagcacatactccggccagtcagcagactcccccacttccaccgtatgcatccccacgttctccgccggtccagcctcacacaccagtgacaatctcgttgggaacggccccatccttgcagaacaatcaacctgtggagtttaatcatgccatcaactatgttaataagatcaagaacagatttcagggccaaccagacatctacaaagcattcctggagattttgcacacatatcaggtaaggagtgcccattcagcctgtcttaaccaggtcaccctcttagggcatctagtccaataacaagtaaccattattgtgtccattaattcatactggaaattaaccagttagaaactatcatgcatgtttttaaagccagtttgtttgtttgtttgtttttcgagacggagtcttgcactgtcacccaggctggagtgtagtggcacgatctcagctcactgcagtctccgcctcccgggctcaagtgatactcctgccttagcctccctagtagctgggattacaggckccgcccaccacgcccagctaattttttgtattgttagtagaaatgggatttcactatgttggctaggctggtctcgaactcctgaccttgtgatctgcccacctyggcctcccaaagtgctgggattgcaggcgtgagccaccgcccccatgctataaagccagttttatttgcctgacttgattgccctgcaacattcagtcaggattttttttttttttttttgagacagagttttgctcctttttgcctaggctggagtgcaatagtgcagtgtcggctcactgcagcctctacctcccgggttcaagtgatttcttgtatttttagtagagacggggtttcaacatgttggccaggctggtctcaggtgatccacccgccatggcctcccaaagtgctgggattgcaggcatgagccaccgtgcccggcctcagtcaggattgttagtcactgtcccatgaaatgaaactcagttnnnnnnnnnnnnnnnnnnnnnnnnnnnnnnnnnnnnnnnnnnnnnnnnnnnnnnnnnnnnnnnnnnnnnnnnnnnnnnnnnnnnnnnnnnnnnnnnnnnnnnnnnnnnnnnnnnnnnnnnnnnnnnnnnnnnnnnnnnnnnnnnnnnnnnnnnnnnnnnnnnnnnnnnnnnnnnnnnnnnnnnnnnnnnnnnnnnnnnnnnnnnnnnnnnnnnnnnnnnnnnnnnnnnnnnnnnnnnnnnnnnnnnnnnnnnnnnnnnnnnnnnnnnnnnnnnnnnnnnnnnnnnnnnnnnnnnnnnnnnnnnnnnnnnnnnnnnnnnnnnnnnnnnnnnnnnnnnnnnnnnnnnnnnnnnnnnnnnnnnnnnnnnncagcattgacagagcaggaggtgtatgcccaggttgctcgtctctttaaaaaccaggaagatttgttgtcagagtttggacaattcctaccagatgccaacagctccgtggtatgtttttttaataagaattacactatttactattattatcttagatgagttggaaaactgtgctcagaaggggacttttcctagatgatatttgtttgctttgataagagcattaatctcattcatgtgtcttaatcagcttttaagcaaaacaactgctgagaaggttgattctgtgagaaatgatcatggaggcactgtcaagaagccccaactgaacaacaagccgcagaggcccagccagaatggctgccagatccgcagacatcctacaggaaccacccctccagttaaggtgagaatgggcagcagctgctcattttgacactcacaagtatttctaatggagaggtactctagaggtggtcatgtgttttgttgttgttgtttttttttgtttttttgagaccgagtctcgctctgtcgcccaagctggagtgcagtggcacgatctcggctcactgcaacctctgcctcccgggttcaagcgattctcctgtctcgcyctcccgagtagctgggactacaggcgcatgccaccataccgggctgatttttttttttttttagtggagacggggtttcaccgtgttagccaggatggtctcgatctcctgacctcatgatctgcccgcctcggcctcccaaagtgctgggattacctgtgcccggcagtcatgtgttcttaagtgtgttaacggttgggtcctagatatttggaggaagttagtattgtgtcacagaaactcagtgcagagtttatctggctttgcaaaagagtattagaataacattgattgcttggattactgtacttttctgagttctttattatctctcctttgcaatgagctgtcatttctttaatgttttggttgctactaagaatttccaatacttgaaatttttttcccttcwtttttttttgagatggagtcttgctctgtcgcccaggctggagtgcagtggtgtgatctcagctcactacaacctctgcctcccgggttcaagcaattatcctgccgcagcctcctgagtaactgggactacaggcgtgtgccaccacgcccagctaatttttgcatttttagtagagatggggtttcgccatgttggccaggctggtcttgaactcctgacctcaggtgatccacccacctcggcctcccaaagtgctggaattacaggcgtgagccaccgcgcctggccccttcttctttgatgctttaaatctgccttgtgttaagaaagaacattcttgagcttgagaattatttcagaaataagtggtctctgaggtcctcttgtgagtagagtgcatgtgttttttgagatctctggtctagaaccctgtcctgctcaaagttctttgttgggttaccagatcttatgtgtatcatcttaatctccaaggcaggacctttgggctgtagcagagggaagtcttaaactcctcttagtaatccattacatgatgttttttgttatagttaacactgatggtctgcctgcagaaaacttagcttgctcccttctttgatgtaacacagctatgatagggagagggctagttgtatgtattgaatgtttaattcttcagtgaatttcaaagcagtatgtaatatagaagagacagatatgtctgcagaattaaataatgacaaaagtttgggaatttctaatagtaagaggtggctgatgaatagtgattgactgactacaaggtctgacgtactaggtgttactgacacttttgaagtatccttttcattagtgtttgtcatggtttcttcttttgaaatcttttgaaatcaagttgaacataataatggtttctatttcttcatttcaataaagagaattagttatatgggtagcaagaatcagctcagtagatacactccatgcttggatttacgtccgcccactcttgattacctacaggtggcaagaatatagtgggggcttaaaattctccgcctactttctccataggcagtgtaagcagaggctgcggctcttaagaaagtatactctgagatagccaaggtaaatgtgctacttctcacaaagtttgtgcatttcttcatagagagtaagtggtggattttaaaagtaacttcttgcctgacaggattatatcatggcctgttggttccctttagaagaacaatattaaattagtctgagtggatattgctggcgtgcctttttttttttttttttttttttttttttgagatggagtctcactctgttgcccaggctggagtgcagtggcgtgatctcggctcactgcagcctccacctcctgggttcaagcgattcttctgtctcagcctcctgagtagctgggaccataggcgcacactaccacgcccagctaatttttttgtatttttagtagagacggggtttcaccatgttggccaggatggtctcaatctcttgacctcatgatctgcccaccttggcctcccaaagtgctgggattacaggcatgagtcaccatgcccagcaaattatgctttttaagtaaatttttaattgaaatattattcagggttaaagattgatttctgtcaatttgtgagctctttttacaaacagccttttctccctcagctggtaggagaacaaaacagtggcattagattctacatgaagttactttgggcccctagaaaaagtaaggatattctaaaagtttgtcacagtaatgtcatgatcatttctggagaaaatattttgggggtagaatgatctttgaacctctgttgtagaaagaaacttaataggcaaactgaaatagaaaatatgagttgaaatcttagagggtatggagtgagttggttagagttctctcatttgtttcaaattattaatcagcagtggtttcagtgatgaaaccattgaatacagacaaaaataaaattcagagaaaaccaytcgttgaatctcacatgtttgtatctttcttttgcagaagaaacccaaactgctcaatctgaaggattcttctatggcagatgccagcaaacatggtggtggaacagaatcgttattttttgataaggtgagtaatggatgagttagatttgatagtgcctgttaatgccaaaagaaaatcatcttatccccctggaaggtttcgttttaaaggtgtcaggctaattaggactttctgttttttaacatagtttcccagttgtgagtcctttgagtctgctagtactattagcatagctagaaaaatggtagcattgtttgctttggttttatgaagcagtttggggcagaagacagatttttagaaaatgtattatgtttctcttgaaagatgtttggagctcccattgtagatatccaggtctgtgtggcaggcagtaccagtgcctgtaccaatttttgaggatttaagatgacttgtaatctttttttttttgagacggagtctcgctgtcgcccaggctggagtgcagtggcgcaatctcggctcactgcaggctccgcctcctggggttcacgccattctcctgcctcagcctcccgagtagctaggactacaggcgcccaccacctcgcccggctaattttttgtatttttagtagagacggggtttcaccgtgttagccaggatggtctcgatctcctgacctcgtgatccgcccgcctcggcctcccaaagtgctgggattacaggcgtgagccaccgcgcctggccgatgacttgtaatcttattgctgtgatagttatttgtagtacacacatacatagcattcaggggaattctaatttacttgcatgttttcaaagctacccagctgattctaatgagcaacgagagttgagattattggcataaatgatgttgtgtggtgccttagtttggccacataaacttaagtgtgatttgctcctcggagtcaacttgatgattagcaggaaactttcatcagggtagctggcacctgttgggcttctcactggtaggaatcaacctggattgatctgtggtgattgactctattttctgcctcttgggttttgcagaagggcagatgatttaacatctccgtgattagtatctcctgatccctttctgtctgctgtgcctatgtgagctttttgcaggagagtcctgcaagagtgttgagtccttagctctgatgtgaatcattaccaaagtctgcttgggcggttggtgctcttagacaagtgtggaagtctagatcacaaccaataaatgtcaagaaaagggtatggaagggaagctattataaattaagaattaagaaatatataagccaaatgtgacatgcagactttggattctgaatttaaaagctgatttatttttatttttatttttatttttgagacagagcctcactctgttgcccagcttggagtgcaatggcgcaatcttggctcactgcaacctccgcctccctggctcaagcgattctccagccttagcctcccaaacagctgggactacaggcgcctactaccgtgcccagctaattttttcatttttagtagagacagggtttcaccatgttggccaggctggtcttgaactcctggcttcaggtgatccacctcagcctcccaaaatgctgggattacaggtgtgagccaccacacctggccaatagccaatttttaagacattaattagacaattgaacttgacacggactcaatattagatgctattaaggaatcttttttacatttttgggtttttttttttttttagacagagtctcgctcttgttgcccaggctggagtgaagtggtgtgatcttggctcagtgcaacctccatctcctgggttcaagcgattctcctgcctcagcctcctgagtagctaggattacaggccccgccacaacgcctggctaatgtttatatttttagtagagatgaggtttcactgtgttggccaggctggtcttgaactcctgacctcgggtgatcagccctccttcgcctcccaaagtgctgggattacaggtgtgagccaccacacctggccttttttatttaagagatgggctcaagtgatccttcttaccctcctgagtagctgggacttgcaggtacagaccaccacactcagctaatttttaaaatttttttggagagagggggtctcaatgttttgccctggctggtctcagactcctgggctcaggcaatcctcctccttcggcctcagcatttgccttccaaagtgttgagattacaggtgtgagccaccatgccttgccttaaggagtcttctgaaaataagttaatttctaagagtaatgggttttttgtttttgtttttgtttttttgttttttttttattttttttctgggacagtctcactccattgctgaggctggggtacaatggtgtgatctgggctcactgtaacctccacctcccgggttcacgcaatcctcctgcctcagcctcccgagtagctgggattacaggcgcccaccaccacacccagctaatttttgtatgtttagtagagacagggtttcactatgttggccaggctgtctcgaactcctgacctcaggtgatccgcctgccttggcctcccaaagtgttgggattacaagcgtgagccactgcacccagtcctgtaatggcattttcttagtactttttcttaaacatatatactatatctagatgaaatgtctggaatttgctttaaaatgcagtggtaggagaagtaagtatagatgaaacaaaatttactatagatcattgaggttggggtgagtacataggttcgttatacttctgtctacttttgtgtatgtttaaaagctaataaaaagtaaaggtaaatagggtatacagtataaaaggtacagtgttcttttatctttagctttaaaagtctagattctatatagtgtctactgatgaatagttaagaaaagcatacggaagtctggagcaggggttgctgataagccacttggtttggtggcagtctgtggtcttcaccaaaggatcacagtgctaaatacttattttggaactgaaactccagattggtaatctagctagactagttttactttgtctatgccattgatcatttttgggtttttggtattaagatgctcaatattgtaaatagaggaagaaaaaagaccagatcagaggacagaactatcttaagagagcgttattccagattaccagagtttaaaacagccttggcaaagattcttgctgtaaacatgttaagagaggcaacaggccggacgcagtggctcacgcctgtaatcccagcactttgagaggccgaggtgggtggatcacctgaagtcaggagttcaagaccagcctggccaacatggtgaaaccccgtctctactaaaaatacaaaaaaaacattagctgggcgttgtggcaggtgcctataatcccagctactcgggaggccgaggcaggagaatcgcttgaacccgggaggcagaggttgcagtgagctgagatcgcgccattgcactccagccaggacaacaatagtgaaactcggtctcaaaaaaaaaaaagaaaaagaggcaacaaaaacctgagtaactctgatatggtgtggagaatcaagcatatgagaaggtatactccgagatctcagtttttaaattgttattatggtattttttttttgagacggagtttcgctcttattgcccaagctggagtacagtggcgtgatcttggctcactgcaacctctgcctcctgggttcaagcgattctcctgcctcagcctcctgagtcactgggactacaggtgcccaccaccacgcctagctaatttttttgtatttttttctttagtagaatggggtttcactatgttggccaggctggtctcaaactcccgatctcaggtgatccacccacctcggcctcccaaagtgctgggattacaggcgtgagccactgcgcccagctggaaaattttgaacatacataaacagaatagtaaaatgattcctcacgtacctaccatccagctttagcggttcccaattctagccagttacttgtttcatatatattcccacccatcccagtttatttggagacaaatcgcagataccttatttcatccatacatattttagtaagtttcttttaaaaatgactcctttttgtggctgggtacagtggctcaaacgcctgtaatcccagcactttgggaggccaaggcgggtggatcacttgtggtcaggagtttgagactagcctagccaatacggtgaaacctcgtctctactaaaaatagaaaaattatccgggtgtagtagcacatgcctgtaatcccacctacttgggaggctgaggcaggagaattgcttgaacccaggaggcagaggttgcagtgagctgagatcgcaccactgcacttcagcctgggcaacagtgctggactgcgtttaaaaaacaaaacaaaacaaaaaaactccttattgcaaacataatcattatcacatctaaaaacactaacgttgattccttagtgtcatcaaatatcagtttaaatttccccgtttttattttatttttttacttatgagacagagtcttgctctgtcacccaggctggagtacagtggcattatcccagctcactgcaacgtctgcctccagggttcaagtgataatcttatgtttcactcagccacccaagtagctggaattacaggcgtgtgccaccatgcctggctaatttttgtatttttagtagagacggggtttcagcatgttggccagtctgggctcgaagtcctggcctccagtgatccacccaccttggcctcccaaagtgctgggattataggcatgagccaccacgcccagccacaaatttccccagtttttaaaaactaatggcaggrcagctgggcaatatatgacctcgtctctgcaaaaaatttagaaattagccaggcatggtggctcacacctgtagtcccagctacttgggaggctgaggatgggaggctgcagtgagctgagattacacaactgcgcctcctacctgggcgacagagcgaggcccttttcagttccccactttaagaaaaacaaaaactgtttttcttcccgttgtctccataaggtccgaaaggctcttcggagtgcagaagcctacgaaaatttcctacgctgtcttgttatttttaaccaggaggtgatctctcgtgctgagcttgtgcaactagtctctcctttcctggggtaagtgaagtgaggggcttagccctgatgcatgatatggagaccaggtaatgtttgatttgtgagagtatatgataggcaaagttaatttacttgagatacatcagttgactcaaatgttagtgccagaagagtcctgagaagtcttctagtccagctctagagatgagaaaatagagagggcattaagtatttatcgactaatggccaagactagtggtctcctgatcttctaaccagtgctggatgtttatcaagaaaaatctctcccagagttctggaatttttttaaaaattattattattattttttttttgagatgaagtctcactcttgttccccaggctggagtgtgatggcatgatcttggctcactgcaacctccgcctcctgggttcaggtgattctcctgcctcggccccccaagtagctgggattacaggtgcctgtcaccacacgcccggctaatttttgttatgttttttagtagagacggtgttttaccatgttggccaggctggtccagaactcctgacctcaggtaatccacctgcctsggcctcccaaagtgctgggattacaggcatgagccactacaccgagtctggaatctttactatatttgacaacctaagaattatgtgaacattaaagcaatattcttgatcaaaagaatggcttgttattttgcctggtttcggtacaactctttgatcaccactttaactgatctgagagtattttattagaaaaaggggaaaccaaatgctcagaagcagttcttcttaggcaggaaataattcatccctggtagcagatttctgatccaaaaccagatggtagtagtcatacctcaggataactgcatcctgcccctaattgcttgtcactttttggtttgattcttcaggaaattccctgagttgtttaattggtttaaaaactttctgggctataaggagtctgtacatctggaaacttatccaaaggagcgagccacagagggcattgctatggagatagattatgcttcttgtaaacgattgggctccagctatcgagccttaccaaagagttaccagcagcccaagtgtacaggacggactcctctctgtaaagaggtaaggccttccctagcaaagatcagccctgggtcctcagctttttccagaagggagtggtggtaccaaggattgagaatttatatgaatgatgaaattaagaacccttttaatcctttttaaaaagaaaatgttttctacttttttgtttgtttttgagacagggtttcgttttgtcacccaggctgtagtgcagtgatgtgatcacggctcatagtgcctcaacctcctgggctcaaatgatcctcccaagtacctgggacttacacatgccttcacacccagctaaaaatataaaaataaaagtttttagttttgtaaagattgggtcactcctcctgggctcaggtgatcttcctgcttcgtcctcccaaagcactggaattatatttccgcttatattcagcacccttttcttactaatagctttttgtaaacttgctaaaggtgaaatttgtgaagtaatattagttgcctatttctctgctagagttttgtcttttcattcagaatgcttaatcaccagaaagcttttttaggcttttgtttcagtctctcttcttctacccaaaggttttaaatgatacctgggtttccttcccttcgtggtctgaggactctacctttgtgagttccaagaagactcaatatgaagaacatatttatcgttgtgaagatgaacgctttgaggtacaagcttgtttggcatttgaagttgggggaaatgggagatgctcagtgagactatcagtacctgtctctgagggktattaagatggaagagccaaaggctcacattcttctatggtaagtgcttgttgtggtactttccatgctttatgcattggtcaaatgtatatattagtacatgctttatggcaaatgtgacttatctaggccactttagcccttttaactgaaattgtccattgatgactaaataatagttcttttgattttgcatggcattttaagattattatgttttgcatggtgaagaaaatcagtatcctaaggtttatagtactttcttgaagctgtttttaaattatttaagatctgtgtgtattgttacccttagcaagtatcttgccatggttagcaaaccagctctgagaactggcatttttctttcatgtttctggtattgattgctttgttgttttttgtttgtttgtttgtttgttttgttttgtttttttgagacggagtctcgctctgtctcccaggctggagtgcagtggcgcaatctcggctcactgcaagctctgcctcccaggttcatgccattctcctgcctcagcctcccgagtagctgggactacaggcgcccgccaacacgtccggctaattttttgtatttttattagagacggagtttcaccgtgttagccaggatggtctcgatctcctgacctcgtgatccacccgtctcggcctcccaaagtgctaggattacaggtgtgagccactgcgcccagctgattgctttgttttgttttgtttttttgagacagggtctcattctattgcccaggctgcagtgcagtggcacaatcacagttcattgcagcctcaaccttccagactcaagtgtgatcctcccacctcagacccccacccctacccgccaccgagtggctgggactacaggcatgtgctaccatgcctgggtaaattttttttttttttttttaaactttaaattctgggatacatgtgcagaacgtgcaggtttgttacatagatatacatgtgctttggtggtttgctgcacctatcaactcatcatctaggttttaagccccacatgcattaggtatttgtcctaatgctctccctccccttgcctcctaccccctgtggctaattttttgttttttatagaaacagtgttttactacattacccaggctggtctcaaactcttgggtccaagcgatcatcccaccctggcctcccaaagtgctgggattacacacatgagccaccatacctggcctgattggctccttttgaaagaaggctaaattagggacccctttctttttaaagacagagtattgctctgtcaaccaggctggagtgcagtggtgtgatctcggctcactgcaacctctgcctcacgagtttaagccattatcctgcctcagcctcccaagtatctgggactacaggtgtatgccgctacacccggctaattttttttgtatttttagtggagatgggtttcaccatgttgaccaggctggtcttgaactcctgacctcaagtgacccacccgtcttggcctyccaaagtgctgggattacaagtgtgagccactgcgcctgtcccaggagctttattttgaagtaattaggaagggaagagtggagtgaataaatgaggtggtagaaggccccataccacctatatcaggagagggactactgaaagtgggctcaatcctcagtgtgtttatatgtctggtttacattatcatttttaaaaagggaagtctggtttgtctaaagatgtaaaatgatacgtatcctatttagtgtatctgttacattaaattgactggctgtgcttatttgtgtggataggtatcttgctggtttttgtttgtttgtttgtttgttttggtactcttttagctctttgccagttttcccgcctcacacttggttcagcagtttctggtgtgtttttaattgagaaccacatgctgcctggccactggcaggtggttggccatctttgccccagcatttataaggagttgcacctatttgcagaaagctaaatcaagacagatgttaacttccatagggagtgttatcaagctaaagaaggcatttctttgttacttacgtttagtaaggttaactgatgagtttagcagagcttggcatttgtttttgacagagtgttcctatcctctctcagctggtatgcctccaaatgagaggcaacttcatttcccatttgtgactacaagggcaaacatgaaagaagtggggtgtgcatgtgtttaagatttggtgggatgagctagtttgaaggaatgtgcgttaccaatcaagataggttagtaatgcctcagtacagacaactcccacatctgagtgacttgtaaaaccaatgggtttaatttctaatcattctacatgtacattgatgtttagcaggggatttggcatatcagaattacttggggattcaggccaagggattgctgccattatgaatgttgctagtcactaggaggaaaagagagcttggaatgatctcacacctttaaatgctgcagcctagaagtaataaacattacttctactcatctcataacaactcattggtcaaaactagttacatggccctatccaatcataagggagccaggaagtttagtccattttttgttcataattggagagcaagaggggccagaaatattgaccaaatgactaccacattcccaaaacaagaaaacttagggaacacttctgcaaacagttggttgtagaccgttgagactgctcatttacttcattttctgtttctcatttagagaaccttattttaagctagggaaaaagtagactcaaaggttgccaggagtccaataagaatttaaatggttacccgcagctacaacagtgaactccttaagttatgatagtcactgctcttattattactggatgtggaacaaggctattgaatatttaagtatttgaatatatttaaatatttcaagttaaaccaaaaaactctcaagacaaagcggtcttttgggattgttttgattgttattgtttgttcataatggatcttagcaattcaggaaagttcagggaaacgtttcagtaaagtcatctcctgtttggttcctctggtctaaaatcagtagtcctaagcaaagcacacggtggtggtggcggcagcagcgacggtggtggtaataactaccatttatccaacttcatcctgtggttcttatgtgccaggtattgtgctaaatactttatgtggattgtatcatttaatccagacacagggttgtgagagtaataggtgctgttatccctattttgctgataaagaaacagtcttatgtagctagtagggcagaaccaggattcaaatccaaggagtttgactccctaccttattcttctaaacactactctattctattttgatttgggtcctgagcatacccttctttgtcttcctcttcagcttgatgtagttttagagaccaatctggcaacaatccgggttctggaagcaatacagaagaagctttcccgcttgtctgctgaagaacaagccaaatttcgcttggacaacacccttgggggcacatcagaagtcatccatagaaaagcactccagaggatatatgctgataaagcagctgacatcattgatggtctgagaaagaatccctccattgctgttccaattgtccttaaaaggtacatgagcaaatgtgcccttagtgctttagtgtacttcactaccggttcagtgtctcattaaataaggctctcattttcaacctggttgtcccatgagacctctctttctccccaaccctggttgttggaattcaggtgcagaatggaacttcttttgggggtcctgtgtaaccaacattagagaacaaatcttgtaagttcatggtggaaggctctgtgtgtatgtttgggggagtattttaaaatacagaaaagaaaagaagataattaccacccatgttcctgccacactcaggactaactgttgttaacatctttgtggtttgtttgtttttgttttgttttgttttgagacaagatctcactctttcacccaggctggagtgcagtagtgtgaacacagctcactgcagcctcaacttcccaggctcaggtgatcctcccacctcagcctcccgaatagctgggactacaggaatgtgccaccacacccagctaatttttattttattttttttaatagagatgaggtcttgctatatttcccaggctggcctctaactcctgggctcaagcaatcctcctgccttggcctccccaaagtgctggcattacaggcacaagccacaccacacccagccccatgtcattattgaccacactgtgaatcctttgttaggagcttggttctctctcagtatcatctggtaaaaattaattcttatttgctgcacagttcacaaatacccagatttgatttgtcctccctcatcttcccctcaagagctggcacagattgatggtttcttctccctcatcttcccctcaagagctggcacagattgatggtttcttcttcttgcctgtagcatttaacttctggcttttgagatacaggttattcttcagttttagtgcttttttttgtcttagtctgttctcttctgggttattagaatcagttctgatcagaactttcctgactgtatccagaggaacataactgtgcaagttctcttgtcttgracttctgtgtttctattagcattgtgaacgttttgcaaagtcctatagcaaagaaacaagaactctttttttcaaggaatacttatacctgaaagatattccctggaatgctgtttttaagtaaccattctaggtaaattatttgactttgagataaatcatttcctcaaagtaagtcttggatgagtaattccctcatgaaacagagttcaagactggtttgatagcatcccaagttgccagtaattttgagagacctaatatagctttgcacctttctttaactaaagtaagcctggcaaatttctttcttctaaaccctctgaattcccatgtgttgtttccatcccttcccgcttcactaggttgaagatgaaagaggaagaatggcgagaagctcagagaggctttaacaaagtatggcgagaacaaaatgagaaatactacttgaagtctctggaccaccaggggatcaactttaaacagaatgacaccaaggtcctgaggtctaagagcttactcaatgagattgagagtatctatgatgaggtgagcggggggtttctgcatctgtgagaggactctagtctatatttagcacagctttgatttctggaaattacctttgttaaatgcaggtgagactctctaagacctgttgattcttgcttgatagctgtcatagccttttctattcctcattctaccattttaaatctaaactatacctttatacctaagctgtttgactagtttcctagtttactgtcctggtttcaacttatacctcctgcctccattttccacttctccgactacctgtttccttcaaacaataataccttgtatccatatagtcccatctctccttacttacagcttcaaaatttgtcattgaccaccaaactctttgtaatccttgcttattcagcatgcctaccaggactataaatagtactaggagctaggatcagagatgaataagcaataaatcctggtttccgtgggctcagttttaggagatggatagaaacataaatgcagtgcaattgggaattcctggagtggggtgatcctgaactttaaaaatagtaaaatgagctcttatgtgaacttaatcaggccgggcacagtggctcatgcctgtaatcccagcactttgggaggctgaggcgggcagatcacctgaggtcaggagttagagaccagcccagccaacatgacgaaaccccgtctttactaaaaatacaaaaattagccaggcgtggtggtgtgcacctgtagtcccagctactcggcagaatgaggtgggagaatggcttgaacctgggaggtggaggatgcagtgagctgagaacatgccactgcactccagtctgggtgacagagcaagattccgtctcaaaatcaataaaataaataaacttaatcctccatattttgctgatgttactttgtcaccctccatacccccaccccagaagtaamgtaaatcacagatctcatatcatatcctttatatagatactaatccagaattttgaaagatagtcccactgggcacagtggctcacgcctgtaatcccatcactttgggaggctgaggtggacagataacttgaggccagaagttcgaaaccagcctggccgacatggtgaaacctcatctctactaaaaaatacaaaattagcnnnnnnnnnnnnnnnnnnnnnnnnnnnnnnnnnnnnnnnnnnnnnnnnnnnnnnnnnnnnnnnnnnnnnnnnnnnnnnnnnnnnnnnnnnnnnnnnnnnnnnnnnnnnnnnnnnnnnnnnnnnnnnnnnnnnnnnnnnnnnnnnnnnnnnnnnnnnnnnnnnnnnnnnnnnnnnnnnnnnnnnnnnnnnnnnnnnnnnnnnnnnnnnnnnnnnnnnnnnnnnnnnnnnnnnnnnnnnnnnnnnnnnnnnnnnnnnnnnnnnnnnnnnnnnnnnnnnnnnnnnnnnnnnnnnnnnnnnnnnnnnnnnnnnnnnnnnnnnnnnnnnnnnnnnnnnnnnnnnnnnnnnnnnnnnnnnnnnnnnnnnnnnttacaatgagccaagattgctccactgcactccagcctgggtgacagagcaagaccctgccaaaaaaaagaaagaaagatggttccaattctgtcctactctccctgtaagtcatcagtgtgtagaaggtacctgtattttgacatcaaaccacgtctctgtcattacctatttgtttctggaagagggacaaaaattattgttatagtcaggtcctaagttttgttttgagacagagtctcactctgttgcccaggctggagtgcagtagtacgatctcggctcactgcaacctttgcctcacgggttcaagtgattctcttgccttagcatcccaagggctgggattacaggcacctaccaccatgttcagctaattttgttatttttagtagaggcggggtttcaccatattggccaggctgatctcaaactcctgacctcaagtgatcaccctcctcggcctaccaaagtgctgggattatagacgtgagccaccgctcccagtcccaggtcctaagtttttgattagaaaaatatagacactgtggttgataatggggatgtatggctgatgtggtcttgtagacattgttgtcgctgtagacatctcacagaatacttttgtgtctctgtcccatcagaggcaagagcaggctacggaggagaatgctggtgtacctgttggcccacacctctcacttgcgtatgaagacaaacaaatactggaagatgctgctgctctgattatccaccatgtgaagaggcagacaggcattcagaaggaggacaaatataagataaaacaaatcatgcatcattttattccagatttgctctttgcccaaagaggtgatctctcagatgtggaggaagaggaagaagaagagatggatgtagatgaagccacaggggcagttaagaagcacaatggtgttgggggcagtccccctaagtccaagttactgtttagtaacacagcagctcaaaaattaagaggaatggatgaagtatacaacctcttctatgtcaacaacaactggtatatttttatgcgactgcaccagattctctgcctgaggctgctacggatttgttcccaagccgaacggcaaattgaagaagaaaaccgagagagagaatgggaacgggaagtgctgggcataaagcgagacaagagtgacagccctgccattcagctacgtctcaaagaacctagtgagtgccgagacctctgatttacagaggatgtgtgaggttgaggaccttagagccacctagacttgggactgcttcttttattaatagagcacaggcattagagtctgtgtagttaaactctctgaacctgtttatctgaaaaatggaggctctagttgcttgtggtgttgctttgtgcaaagtatcctatgcagggcttagatcatggacacttggtcagtggttggtactgtggacgcacctgggaagggggtatcacagttaatttctcaaatggcagatttctgggttactgccatctgtttcaaagtacagatagagactaaactgtcacagccaatttcaatccatgacagaacataaattcctagtgcttaaaacagaattttctcatatttttgagcaggacttctgtttaaccagtggggtttatggctcattcttaatatgtagaaatagtttatggaaaggagactggaactcaaaaggtgataygagacatggagaacaggcaggacagggataaagatgtagaactcaggaaaaggaaagtaagtgagggttcaggacgctgtcatgtgctttatgtaattttgtgctgcctgcttccagttcacgtcataaattaggtacttgagctgtgagccaaaagctttttcatgaagcatttcttctgggctcttaaggaaatagccaacctgaggagtgtatcttcttcttcttttttttttttttttatgtgttgctgatgtaggaagcccagatatggccctagctttctatctgttgaggagctaatgacactgaaaaataattctgaaagcttttatctagactagtcctagctcgaaagagataaattttagatctcattgtggtgattccatctacttgggtagaaattagaaattaaatggcctattcctggcttggccactgacttaacctggtttgaggcttacataatgttgtcttgtctgataatgccaaccctcacacttaccacagcttgtttggacaaatctgtggtttggactcaaaactttattctggcataaaagcagttttcatagcagtggtatattttggagtctatagcctatacctattctatggagctaaagaatgtgatagtctgtgatgaaactcaagccagttgcctcttttaaacagtatttgtcctgttttgcctgttttttaatgaattcgtcagacttcagataaatggagacaacttggttttgctcctagccttttttctccagcacaaacacaactagcaagtaaccaattagtcagtgacaaatagttcgttttgtaacttttttcattttagtcaactttttgttgaagtgcaatgtataggccgggtgcagtggcttacacctgtaatcccagcactttgggaggccgatgtgggaggatcacttgaggccaggagtttgagaccagcctggttaataagtgagaccccatctctacaaaaaaatacatataaggtacggcatgtatatatagaaaagtatacaaatcagaattgtgcagctcagtgaatttttacagactagacgtacctatgttcaagaaacgaaacataaccagtactctgataaccagtcctttttccactttgttgatttctaacactagagattagatttgtctatttttgaactttatataaatgggtctttagtaagctaaaggcagcactctttaatactccttgtgccctctgctagttgccaaatgtctttaacaactgatgagatttattctagctagtgattgaaatgattcatgtgcagcaactacagatgatttaatgcaatttgtgaaatacaacgtagcgaatccatttttaaacaaaaggactttgacaaatgcagattacttcattattcataaaggatttaatttgcactcctatttttgtgttcccaagaggtttcccagtgctggagtatggctgtgtctgcctttcctcatctgtactttatgcttcattgaaatagctttatgagcaagtgacccatgtgaggaatgctcttgtgcaggctgggagagyaggttcctctctcagcaggggagccaacagctctttgaaggactggcttccctaggatattttcctctctgaaagtggcccagcagtaccataaagaagtatctttctagcatggtagtcagaatattagaagccactgttaaagttgcagagtcactctgatagtgctggtgattgtagtcacctgtcggaattcatctctgtttacattggaatgagtgagtatattttgaatacctagtgttcatactttcaaatgccatttaggccagctgtgggatttgccctgtactctatccctagtcttttcttagcaaggtaaggcctcaccaatcccatctctcccacagtggatgttgatgtagaagattattacccagctttcctggacatggtgcggagcctgctggatggcaacatagactcatcacagtatgaagattcactgagagagatgttcaccattcatgcctacattgcctttaccatggacaaactgatccagagcattgtcagacaggtgagggcatggaggaggctagggtgagtaagggaagaaatccttacctagagatgggccacgcaaggaaaaggaaaggcaactttttcatataacagtgtttatgaacgtagggttctgaagagaggaggggaggttaatgtgatgcctgatttctcatgttaacaaagttgcagtgtatgagcctgcctaccccatatcctttcttgctggccacctgtagagtgcagtggtcctgaccccagcttcctgcacaacttgtctatctcttaccttgtctgccatgggtaagcacacagtgtggaacattgcgtcttccataggtgttggtaagtttttttttttttccttaaatagagacagggtgtcactgttttgcccaggctggtcttgaacttctggtctcaagtgatcctcctgtcttggcctcttaaagcgctgggattatagacacgagccactgcgcctggtcaaggtgttggtaactcttatgtacttgcattgtttaatatttgaaattctttttataagaaagggttcacataacatcttttataatactctgcccacctcactcatctgcggttccctctaagttaggtttctggttggttttgtgtgttcttcctgtggcaccctgggaacttgtaaacatgttgttctttacaacaatgatataaaaaatagcttgtaacagatagtcacatttctacttcttggacttgagttctgaactcccagagagattgttggttaactgcttttttctttttctggagacccagctctactgctgattgactgcaagtccccagcagggcttcatttttccttttcagcatcctgttctgtggctcccttggccctttttgcccatatgccaaagagctgaaaattgatgtgggctgtgtgaagactggcaaataccttaaagttcttagtgatgattccagctttctccttcttatagacgtactatatgggcattattsgtcctgtcagctgggtggctgatttgagtttttcagaactgtctcccttcttgggggctaagagcttcctggagaagaggttgagcttggagtcttaactccttcaggtgctgaacattggcccacagggacatggtgtactaatgccaccctcttgtggatgctggtcacccttaactcttctaagctgaagcccctgccagcttgtactttggtgtggtacctcactgtggggcagcttaccatgggtcagatgggtccagatgcagggtgcaggtcaatgtggtatacttttgcttgcatctgcagatcttctgggctggctggttgaaccacgtggccatgggccactgcgattccttgtggaagtagggctttaggatcatgctgttccacctgggtaccgtggctacctacagccctcttccatagaatagctcagcagaaaggcggtgaagtacttaagtgaaaacttgtaaaaagcaatttctaattctagaatccacactgccactgtagaaggaaagagcttgttgcttaatgttctcttgggctaaaatattgaattctttgcaaagtacccatgcttttgccttggttttggaagggtgcatgcctctgtactcctcccacagtatctacacaggattgaggaagagcccttcatataaatgaaccttaacatctgggggaaagttgtcagatagttgtttccaataagttgaagaagttgttaggccttcccataagaggtctggatggtaactggcagaaatcattagatggatacatagtcacccatagtcatactttttcagactaatcttccttaacttccctgaaatttatataaaatacagactccagttaccctgtgcttatgttgctgattacaggcttgctgctgcttcagctaggaacgaagtctttcataccaccagcacagcttaaaaaaaaaatccaataaaactaacttttaataattctgaggttggttttcgaaacaatagttacaattatttactgtatctggttatgattttgaatcagtaataaatactatctccacccaccccccgcttttttttttttttttaatggaaacaggtttcatccagaaaaccccaaaacagtgactttttttttttttttttccaacccagggtctcactctattgcccaggctggagtgcagtggtgtgatcagctcactgtagccttgacctcctacctcagcctcccaagtagctgggaccaaaggggccaccacaccggctaatttattgtattttttgtagagatggagttttgccatgttgtccaggctggcctcaaacttatgggctcaagcaattcacctacttcagcctcccaaagcgctgcgattacgggcatgagccactgtgcccagcctacagtgactttttaaaacattttcaagcttctcaactcctttaactggaggtatctcttctctcattctcctcatatttggtgttccctcagattccactgctgactgaatgtacaacatatatttcaaagtcaaggctggtcatggtggctcatgcctctaataccagcactttgggagtccaaggcgggcagatatattgagtccaggagttggagaccagcctgggcaacatggggaaacactatttgtattaaaaatacaaaaaattagctgggcatggtggcacatgcctgtagtcccagctactcaggaggctaaggtgggaggatcatctgaacccaggaagttgaggctgcagtgagccgtgattgcaccactgcattccagccaagtgaagccattacatttatcttacctattgtaggctggcttaagagggatttgtattaagaatacaataggcaacctcacagacatccaagtacagaactcaaaataggaccacaccatggaaggattgggctgggaggtgatttttctctcctgcatgccttcactctggacttctgctccatgcttgtgctttgctctgcagatgaacatacggcatgtgctccaggctcctccagcctctgaggctttggcttgccctcccagtacccctggtcccagtgttactagacctttccatacagatgctcctcctcaaaaaatctattgaacaccctctctgtcatctccaattagcaagatagagaatctgatctgcttagcagtgggggtgggagttccgtagctgtctctggatttgtagtgctgtcttttctgaagactcgaggaggggccagatatccaaaaagagagtatgggtggggaatcagtaatacagtctacttcaacaagaaagtataaagtagaggcggtggctcacgcctgtaatcccagcagtttgggaggccaaggcgggtggatcacttgagctcagaagtttgagatcagactgggcaacatggcaaaaccccgtctcttctgaaaatacaaaaaagttagctgggcgtggtggcacatgcctgtagacccagctacttaagaggctgaggtatgggagggttgcttgagcccaggaagttgaggctgcactgagccaagatcacgatgccactgcactccagcctgggcgacagagcgagactctgtctcaaaaagaaagtagaaagtggaagcatctgtatgtatgattgaagtcatgctttccatctgtttttttccaccttttcttttttctcctaaaacactgtatcttaatcttcctcatgatatcaggtactcataagcattattttaatggttgtatcagaatcctttatctggactcattgtgatttatttatccatctgtagttgctggagatactgccctttctgccacactcagtcaccgttctgacctttcactgtgtccagttatctactaatacacatactggtcatttaggacttaagaataaatagttatcatggttcctaacacttaaaaagaatgtgtcttcctaaaaatagaatggcttggtggttatgatcatcttaaagttttttaaacagacaaatcaatattgaaattaacgttttgctttcttcttgtatctatttttcacttctgtcattttgatgataaagtttcatttggaaggatttttatttcaaaatagaaatagcatgacatgagaatgggaactctgaaacgttcaactttctagtcattagtttcctaagattgtcacaaaagctactgatagtcaatcatgattggcctgtatggaaagtgagttaactttatgtacaacttaagccctatactttctatcagatacagaaaaataggtgatgtgtttggaaaagtattgggctaggagtcaggaaccttgacttttagtcccaaccctccttcttcagctgagcacccctgggcaataattcagcagctatttcttaaatacttaatgagtttcaggctttgtagttggcctgggaatatagacatagatactgcattcatgattctccaaggctcccttcctcaccccagctcacggtgagctttgcagtggtgcagtctcggctcactgcaacctccatctcccaggttcaagcgattctcctgccccagcctcccaagtagctgggattacaggctcctgccaccacgcccggctatttgtgtatttttagtagagatggggtttcgccatgttagccaggctggttttgaacacctgannnnnnnnnnnnnnnnnnnnnnnnnnnnnnnnnnnnnnnnnnnnnnnnnnnnnnnnnnnnnnnnnnnnnnnnnnnnnnnnnnnnnnnnnnnnnnnnnnnnnnnnnnnnnnnnnnnnnnnnnnnnnnnnnnnnnnnnnnnnnnnnnnnnnnnnnnnnnnnnnnnnnnnnnnnnnnnnnnnnnnnnnnnnnnnnnnnnnnnnnnnnnnnnnnnnnnnnnnnnnnnnnnnnnnnnnnnnnnnnnnnnnnnnnnnnnnnnnnnnnnnnnnnnnnnnnnnnnnnnnnnnnnnnnnnnnnnnnnnnnnnnnnnnnnnnnnnnnnnnnnnnnnnnnnnnnnnnnnnnnnnnnnnnnnnnnnnnnnnnnnnnnnnnnnnnnnnnnnnnnnnnnnnnnnnnnnnnnnnnnnnnnnnnnnnnnnnnnnnnnnnnnnnnnnnnnnnnnnnnnnnnnnnnnnnnnnnnnnnnnnnnnnnnnnnnnnnnnnnnnnnnnnnnnnnnnnnnnnnnnnnnnnnnnnnnnnnnnnnnnnnnnnnnnnnnnnnnnnnnnnnnnnnnnnnnnnnnnnnnnnnnnnnnnnnnnnnnnnnnnnnnnnnnnnnnnnnnnnnnnnnnnnnnnnnnnnnnnnnnnnnnnnnnnnnnnnnnnnnnnnnnnnnnnnnnnnnnnnnnnnnnnnnnnnnnnnnnnnnnnnnnnnnnnnnnnnnnnnnnnnnnnnnnnnnnnnnnnnnnnnnnnnnnnnnnnnnnnnnnnnnnnnnnnnnnnnnnnnnnnnnnnnnnnnnnnnnnnnnnnnnnnnnnnnnnnnnnnnnnnnnnnnnnnnnnnnnnnnnnnnnnnnnnnnnnnnnnnnnnnnnnnnnnnnnnnnnnnnnnnnnnnnnnnnnnnnnnnnnnnnnnnnnnnnnnnnnnnnnnnnnnnnnnnnnnnnnnnnnnnnnnnnnnnnnnnnnnnnnnnnnnnnnnnnnnnnnnnnnnnnnnnnnnnnnnnnnnnnnnnnnnnnnnnnnnnnnnnnnnnnnnnnnnnnnnnnnnnnnnnnnnnnnnnnnnnnnnnnnnnnnnnnnnnnnnnnnnnnnnnnnnnnnnnnnnnnnnnnnnnnnnnnnnnnnnnnnnnnnnnnnnnnnnnnnnnnnnnnnnnnnnnnnnnnnnnnnnnnnnnnnnnnnnnnnnnnnnnnnnnnnnnnnnnnnnnnnnnnnnnnnnnnnnnnnnnnnnnnnnnnnnnnnnnnnnnnnnnnnnnnnnnnnnnnnnnnnnnnnnnnnnnnnnnnnnnnnnnnnnnnnnnnnnnnnnnnnnnnnnnnnnnnnnnnnnnnnnnnnnnnnnnnnnnnnnnnnnnnnnnnnnnnnnnnnnnnnnnnnnnnnnnnnnnnnnnnnnnnnnnnnnnnnnnnnnnnnnnnnnnnnnnnnnnnnnnnnnnnnnnnnnnnnnnnnnnnnnnnnnnnnnnnnnnnnnnnnnnnnnnnnnnnnnnnnnnnnnnnnnnnnnnnnnnnnnnnnnnnnnnnnnnnnnnnnnnnnnnnnnnnnnnnnnnnnnnnnnnnnnnnnnnnnnnnnnnnnnnnnnnnnnnnnnnnnnnnnnnnnnnnnnnnnnnnnnnnnnnnnnnnnnnnnnnnnnnnnnnnnnnnnnnnnnnnnnnnnnnnnnnnnnnnnnnnnnnnnnnnnnnnnnnnnnnnnnnnnnnnnnnnnnnnnnnnnnnnnnnnnnnnnnnnnnnnnnnnnnnnnnnnnnnnnnnnnnnnnnnnnnnnnnnnnnnnnnnnnnnnnnnnnnnnnnnnnnnnnnnnnnnnnnnnnnnnnnnnnnnnnnnnnnnnnnnnnnnnnnnnnnnnnnnnnnnnnnnnnnnnnnnnnnnnnnnnnnnnnnnnnnnnnnnnnnnnnnnnnnnnnnnnnnnnnnnnnnnnnnnnnnnnnnnnnnnnnnnnnnnnnnnnnnnnnnnnnnnnnnnnnnnnnnnnnnnnnnnnnnnnnnnnnnnnnnnnnnnnnnnnnnnnnnnnnnnnnnnnnnnnnnnnnnnnnnnnnnnnnnnnnnnnnnnnnnnnnnnnnnnnnnnnnnnnnnnnnnnnnnnnnnnnnnnnnnnnnnnnnnnnnnnnnnnnnnnnnnnnnnnnnnnnnnnnnnnnnnnnnnnnnnnnnnnnnnnnnnnnnnnnnnnnnnnnnnnnnnnnnnnnnnnnnnnnnnnnnnnnnnnnnnnnnnnnnnnnnnnnnnnnnnnnnnnnnnnnnnnnnnnnnnnnnnnnnnnnnnnnnnnnnnnnnnnnnnnnnnnnnnnnnnnnnnnnnnnnnnnnnnnnnnnnnnnnnnnnnnnnnnnnnnnnnnnnnnnnnnnnnnnnnnnnnnnnnnnnnnnnnnnnnnnnnnnnnnnnnnnnnnnnnnnnnnnnnnnnnnnnnnnnnnnnnnnnnnnnnnnnnnnnnnnnnnnnnnnnnnnnnnnnnnnnnnnnnnnnnntttgatattcactttttagagaattaatgcctgtattggtggacatttaggttgtttccaatttttcaccattataatggataattataaaagcaaatagttggaaacatcctagacgtccaacccactatggggactggttaatgacatcctgttatgaatactggagacagattttgcaattcttaaattataaattgtgaaaatgcagggtctgcccccaccccgaaatctattttggaaataactgtatttgtgtgtgtatatattatgttattgtcaggttgtaagctttactagcagagagcaatttttaaagctttaaaagaacactgagctagatctagcttctggctctgcatgtatattgattagtggtgtgccttgagaaaccagaactcttctgaatttcagttttgtctctgtgtaaaatgaagaaggttgaaataaaaaattctcaggtttccttccaggctctgaccttctccatgtgattctgatagttacctcctctattacgtcctagaagtgggattaccaatggacagagcattgacattttgtggttctggctacatgtgccatatttctttctgacaaaatatttgttttgtaaaacattcttactgacattgattattattttagcgaattctagaagtttgaaacatgaaatagtaccttttgctttaatatatttcattttacttgtagtaagtgtagacttttgcctttatcactggccacccaagatctagtatcttcctcatctcttcagttggagcaaagtttactaagtttattgcctctgcacctctcattccttgagaagatagattacagctacagagacggtcttttgtttacgcttaggtttcttatttgcagcttatgtttattcagagccaaggccaggtccagctgactattgagcttctggacacagaagaggagaattcggatgaccctgtggaagcagaggtatgagcaagtacatcacagaccccaggtgccaagcagagctggcgtgccttgagagtctgtccagtgaccctgtctgccaaaaggccaaggcacctcaggcctgtttaagggtcaggacctggatgcttaaagtacaagtcaatccagccatgtcttcagctgaagagacgggctgcctggttatagatgttaacctcatcttgcacttagtaaagctatctcctctaaggaagtcttatggttggcagctttcctgttttttcctaaagtataaaaaacaacaaatgaggtctttctcatgtcatcttgattctttgtgtcatgtttactttttattggactgataaagtccagagttttcaacccctgaatagacaggtgtgattatcatagttggttatggcagataatgtacacaggagatgcaggccatatgtatgatgttggggggggtcgtgtgggatgacttgttttggtgggaatgttggcttgttggcagatctttttttttttttttttttttaagcgatgtcagaaatctagattgtaatgtgaaggaaactttcacacatttgccactataaattttgttctttaacaaaatgctctgtggggaaatgaaacttgtcagtgagccagcttctacctgtttatgacttctcataaccttagcacctcagaaacttagcagtattgctggctaacagaatttttaatccgtgttccaatacctactaacaaycatgtctttatagaaagggacttttttgatcttgaaatttatgaattcggggcattgtaatcatagaatttactagagtgcccaatgcattaggagctgtttttgtgatttccttccacctgtattttgtgtttgccatcttagcgctggtcagactacgtggagcgatacatgaattcagatactacctcgcctgagcttcgtgaacatctagcacagaaaccagtatttctccccaggtgagtgagccatgtcatctgtcagcagtccatactgtgcatgattgaggaatggagagttaaatgactttcacgttcttggccttcacatattttattcatttgttctatctgctggggatgctaattcaaggttttatatggctgtcacaacatgagcttacctggagcatgtgtcaaagcatctgggaggtgagagttgtagagaatcaacaataacctccgtactttggatgggaatgtgtgtcagagtctccatggttcgatggaagaggactcacaggactctgcatatagtcagactgatttagtacagcgagaagatgcaaagcagaatcagcaaagcgaaaaggtgcctgtggcaaagctggaggaagccaggctcaagcttcctagaatcctctcccagtggagtcacacaggacactcttaattcttccaacaatgaatgtgacaacacatgcaaaatgctgtctaccagggcagctcattagagactctgtgccaggatttttattgagatgtagtcatctaggcactgtatgcctagcatgtaccaaaatcccaaactctcagaaagaaagcacattttcagcataagctatagagtttgtacaaatagtttaggtacagtgagacacttatatgagttaaggaatggtagaacattgcccaaaatccaagatcccagcccccagccaagggccaacttttataagcaggcttttcaaagaatagcaatcttaggcctgctacattaactcttttctgcacagaattttaaaaatgttccctctgtgtataggcagattgtgatactgatcctccaagtatatgaaaacagtttaagaagtataaaatgggtagaatggctttcttccttcctaaaagttttgaattgaaatcttatgtcttaggtttccaagaaagtatcatcccagtgttattagacttattgagtcctaatgagaacatgggaaaagagataccagcaaaaagggccctgccgggttctccattcattgaatcatttaacacatttgagcagttgctctgtgtcaggttcctctcaacaaaacaggctccatgctaataacatactacaataaacctgtcatcatgtgtctctcaccatgatatgaggaaggaggcacatttatgtactgtgaggaaaaggaaattgatataatcgttctggtggcagggtagttgaagtgtatggaatcttccctccagaatttcagtttctaatgatttgtctgacagctaaggggctcatcttattggccttgagaccccttacactcttagagcatgagtactccaaaaagcttttgtttatatggattatactagtaatatttaccaagttagaaataaaaacaaagaaatgttttcaatctttaattcatttgaaaaataacaatattgggctgggcgcagtggctcacgcctgtaactccagcactttgggaggccgaggctgtggatcacgagatcaggagatcgagaccatcctggctaacacagtgaaaccctgtctctactaaaaatacagaaaattagctgggcatggtggcaggcgcctgtagtccaagctactcgggaggctgaggcaggagaattgcttgaaccggaaggcggaggttgcagtgagtggagatcgcaccacggcactccagcctgggtgaccgagtgagactctgcctcaaaaataaaatatatatatatatatatatatccctattatattttcttaaataatattttttaatgaaaagctaattcaaaacaaaaattagtgaatagagtggcattgcttatattttataaatttgtttagtgtctggcttaccagaagaacagctggattctcatgtctgcttctatattcaatctgttgcattatgtatgttgtttgattgaaatatgtgaagaaaatctggcctcacgcaaatgtgtagctggaaaaaggaatattttcagatccttcagataactggatattctttgatatgacaacaaaactaccagtgatagtttttgtttttgtttttcttttttgagacggaatttcgctcttgttgcccaggctggagtgcaatggtgtgatctcagctcactgcaacccctgcctcccaggtttaagtgattctcctgcctcagcctcccgagtagctgggattacaggcatgtgccaccacgcccggctgattctgtatttttagtagagatgggatttctccatgttggtctggctggtcttgaactcctgacctcaggtgatcctcccacctcggcctcccaaagtgctgtgattacgggtgtgagccactgcacccggccccagtgatagtttcttaaaggttagttggaatatcaatttatacatcagtgggcttttcatgcagttgtaaaaatccattgatttattttgtatcatgaatgaatctttttttcctctatgattttgtaactttacgcaattggctatttggaaaataagttatacacacctactaaatgttgatatattttacagtgtctccaaaagaaatcacattgatttaatatcgctatcgctaggtcatcaaacacatctttaagtattgggaagctgtcaagctcagggtggctgataccagttcaccaaaattcatagttttgcttgaaaattccagtcttaccattggcaacattgttttccttgaagtgataggctcccttgttcatttttgagaaaacatctgccaaatacttggctgagattgactatatttagtcagttgttctttcgggtaaaaatgatgatccacttacaactcaagcaattgctcaagtgcttttctataagaataccattgtactttagcacacaaaggtgctttatgtgtagttcccattttatcacacagcatgttaaaaagatgtaaattgaggggttgggatttaatagaaaatgttactgcttcatcagaaactttttttttctttttttttttttgaggcagagtctcactctgttgcccaagctggagtgcagtggcgcgatcttggcttactgcagcctccaccagccaggttcaagtgattctcctgtctcaccctcccgaatagctgggattacaggtgcgcgccaccactcccggctaatttttgtacttttattagagatgaggtctccccatgttggccaggctagtctcaaactcctgacctcaagtgatctgcctgcctcagcctcccagagtgctgggattacaagcatgagccactgtgactggcccatcagaaacattcttaagtgaaactggcttttttcacttaatgtcattgtatggtcagtgtgaagttcaaagacttgaattgcagtcgcatgaaggtgcaaaatcatggaagtaaaatggattcattgatggtacaagataaaccaacagagtttgacaactgtatgaaaagctcagtgatgtacaaattgatattggaatttggtaacaatttgttcgatattgcaaatacagtttggcgccaccaccagcatttttgttcaccattactttaatggtgccagtgcagatgtcaacacagcaaaaaagggaaataatgttttagtattattatgagaatagttttgatctcacagatctcctgaaagggtcctgggaccctttggacaaagaactgctgtctacagaaatacttgtatacaaagattctcactgaagcaatattttgggctggttggtttttttttttttttttttttttaagacagtgtctggctctgtgtcccaggctatagtacagtggtgggatcttggctttctgcaacctccgccttctgggctcaaacgatcttcccacctcagcctcccaagtagctgagactctaggcacacgtcaccacacctgcctaattttttttwtttttttgtagagaaggggtttttgccatgttgcccaggctagtctcaaactcctgagctcaagcaatccacctgcctcccaaagtgctgggattataggcatgagccacagtggccaacctgaagcagtgtttttaatagcaagttatgagaaacaatataattgtctagctgataacttttttcactggatgttgagatttagcaagcctaccacccctcagggcatccattcatgtgaattatcttctttcttgtgtatgtagaatggcactagtttatatcatctgggggaatttttaaaaatagtcattcaaataaatttttgttatgtggttcagatgaggaacctcagttgaaagaaactgttaaggaatggtaaattggggtacatttttctgcagcagttaaagagaataagacaaatctatcatgaaatgaaaaaatattcatgacagtaagtgaaaagttgaggacaaaatatatagtatgatcctattttgtcttaaaaacaaatcccaaagcagaactgtagctggtaattacatgtgtaaatttacagacagaggcctagaagtttctcattaaaactcttaactggctacatctgctaagtcaagtaggggatgggtgaagatttctgctttttattctgtgtacctttgcagttgaaattttttttgcagtgaaacaactgaacatttgtgtatgtatttaacaaattgggatgagtactatgcaagcatataataaagaaaactcactttggggaagtcacgggaatctgcatctggacgagctctcatcctccggggcttttctgcaataggaatctacggcggatccggaagtgtcaacgtggtcgagagcagcaggaaaaggaagggaaggaaggaaacagcaagaagaccatggagaatgtggatagtctggataagctggagtgtagattcaagctgaattcctacaagatggtgtatgtgatcaaatcagaggactatatgtatcggaggaccgccctgctccgggctcatcaggtgagaaccagtaactgaaatttctgtacacatctcccaccctagctaggaccaggggaggcccagagtcttctgattgtttttctttgtttatgcaaacctgttcttggagctgagacttaactgaggaagtacgtatgttggttgctaaggatgctgtgacaaagtaccacagactgtggcttaaatgacaaaagttgtggagactagaagtccaaagtcaagtgtcagcagtgttggttccttttgaggactgtgagggacaatctcttctaggcctctcctagcttctggttctttgctggcaatctttggcattcctgggcttgtagatccctgccttcatcttcatatggtgttcctacctgtgtgtgtgtgtctgcctccagatgaggtcacattcggaagtactgggggctaggacttcaatgtatgattttttgtttgtttgtttgagacagagtctcacctgacacagcctctcaaagtgctagcattacaggcgtgagccaccatgcccggccaacataagaattttaaggagaatacagttcagcctgtaagagcacgtaaatacccggtggcacctttttggtgaatttactcccagtatttacatctcaagtagtatctgatcttttgcttgtatgaatcctacctgtctttacattctgtctcaattgtgaaaccttcctggtgcagctgcgtatagggtgttatgccaggccctgggactacagccatgaagtagagcagatgaagtaatgcgatgatatgcactaccagggaaacaaatcaggtgaagtgatcaagggtaactagcatacaggccttgctttcactggaggaggcttctcaaaggaggtgatgcttgaggcctgaataatgacaaggaattagcctggtgaagagtagaggatgggtgttttctagacaaaagagctagtacaaggctgggaggaaaggacttggcatattcaagaaattacaaacaccattgtggctcaaggttgcatgaagttagaagggtaggcagaggccacatcactttgtctaatgataggccatggtttgtaatttgtttgagatgcactgggacatttgacaaagatagcttggagttctgtgaggacagtggagatgggtatatataaagttggaagagcagagaccactcaaaagggtgcccttgtccaaatgagatgtgggggccacccgtactactagggtggcagtggaattgcaagaattacattgtagactttatgcatttatttttgagacagagtttcgctgtgtctcaaaccatgcctggctgattttttgtatttttagtagagatgggatttcaccatkttggccaggctggtctcgaacctgacctcaagtgatccaccctcctcagcctcccaaagtactgggattacaggcgtgagccaccacgcccagatgtagatatwatttagatatttaattgacaagagatggtgttggatcaaatgtgggggtaagcaaaagaaggacatcaaggatggtgcctgattagttttggggttttttggtttgttttgttttgcttaagtggagattttaggggctcacctgttaataggaaagggttatgaggtttgggagacagatgaagtgctgttttaagtttgaaaggactacaaaactttcaaatgggagatgttgagcagacagtttaatgtataattaaccctttaacgacaaggggtttggggcactggcccctgcacagtcaaatctgtgtataatttttgactcccccaaaatggaactactgatagtctactactgactggaaggcttactgataaacaacatattttgtatgttgtatgtattatatatactgcattctttttttctttcttttttttttttttaatgaaaatagacayggggtctccttacgttgcccagggctggtctcaaactcaagggttcaaacaacccacccatttcagcctcctaaagtgctgggattacaggcgtgagccactgtgcccagcctatactgtatattcttacaataaagtaagttagagaaaagaaaatgttaagtcataagcaagagaagatacatttactcttcattaagtggttgtggctcatcataaagggtccttattctcatcttgttgagtaggctgaagagggaggaggaagggaggggttgtttttgctgtctcagggttggcagaggtggaagaaaacttgcctatcagtggccctgcgctgttcaaagctgtgttgttcaagagtctgctctacttctctcatggcactgagggaagcgcagtggcatgatttcagctcactgcatcctccacttcccgggttcaagagattctcttgtctcagcctctcgagtagctgggattacgggcgtgcaccaccacacctggctcattttttttgctatgtgttgtgtgtctgcctgtctctgattcacattatttgggacactgggcaacaccagttttgtctttgtatctcttctagtatccttgcatgtggacaccaataaatttttattgaatgtgttggtgggaacagaaccccctgcagaacatctgccaagcctggactctgcttcccagggtggggtaacacagtggagggagagtggttttaagccctttgctttgcactgtctggcttagaggtggatctccatgctgatagaagtgatcaatggctcactgggtcctacccaggatacattagaatcagctggattgctggtttaaaatgcacattggtaaaccaaggaaatgtgggttttgggggttttgggttttttttttttttttttttggagacagggtttggctctgtcatctaggctggggtgcggtggtgcgatcttggctcactgcagcctccacctcctggctcaagcgatcctcccacttcagcctaccaagtagctgggactacaggtgtgtgccaccacgcccagttattatttgtatttttgtagagatggggttttgccatgttgcccaggctggtctcaaactcctgagctcaagcgaactgcctgcctcagcctcccagagtactaggattacaggcatgagtcactgcacctggtcagaaatgtgtattttttaacacattccctcggttatactaacgcatgctaaaattgagaacagcgagctttttcagcccagagcctgtgttcgcatttctttggaggctttatggattttcatgccctcacatgttctatgttcttacctctttaacttctctttaaacagagaatccttttttttttcttttaagaaaaaaacagtggtatctaagacttgagcccacatctttcctttgctcctttagaagaaaattaggctttgtatttgaagggctcttttttggttctgcttcatttaataaaawwttttttttctgttttgcagtcccatgagcgtgtaagcaagcgtctacatcagagattccaggcctgggtagataaatggaccaaggagcatgtgccccgtgaaatggcagcagagaccagcaagtggctcatgggtgaggggctggagggcctggtgccctgtaccaccacctgtgatacagagaccctgcattttgtgagcattaacaagtatcgtgtcaaatacggcacagtattcaaagccccttaactgcaaagccagagcagataacttggggtgtgtgtggggatgtgtgtgtgggcctatgcactcacacactgaagaaacaaggaagatgcctttcaagcctcactgggcctctctgggacatggccacctgacctgtgtgtggctggtgcagcctggcaccaagtgggctacctgttaggaacatgaataccttacaaagctgaagctggaacttttcccaaagggttttgggtatagcctgccctggaggggaaggaagtccatgcaagcaaagacatgcagtttgcttgcacacaccagcagagctaagactggagtctcctgtggcctaactttcaatgagggaaccggatgctgttcacactttgactggatggagatgcatttacaaaacagactggagaaggacttaatactcagatggattggaactatcatggtcactgctcctctcccctccccacaaaaggaaaaaaaagctggatttgattttttttttctggtcactcgagcacatctaagatcacccattaggttttatctgggacctgcagtttggctttgggattgatcatcttgtggattttattcctgacgattcccttgctgcctacccttttctctcctctggttctcaacctcaacgagttcaaatcagttgtcctttttagctcccgtggaactgttttgtatctgcctctttactagtctaccttagtgccatccaccagctttactctctgacacacacacgcacacacacacacaattttaacttgtttttttgtacataatgtacatactgtcaattttttattaaaagaaatatgctttgatgtgctagcataactgctctagcttcttgtgtaccatagtactgtggcttcagatttagtacctatgaacagatgtacaagacatttattacactttttaccaaagggagttaccattgtagtacttttgtgtaaaacttgtcttcccctttgcccccaactttttttttttttttttgtaaataaataaagcttggttcttacttaaggaataaactctcaacccacgtcccttgtcctcaccagaaaatactgtgaagcagggattttgacttcagttccttatccagggtagaaacaggattttgcttaaaatacttgttacttgtcccaaatcaaaatattccaaaatcttagaatacttaagtcttttagtacgtgtttttttcccttgttcaaataatctgaaaatattttatatttgggtaagttgtcaagctatgtagtttgtatttctatatattttttcttattcacattggtgatggatgggggtgagcaacttaaataccaaaccagtgtttgaaaaaaaagtgtgcataaggcatgtggtataccttataaatggagttgggagggagagaatttgaaatgggatacctatttttttaattacataaatttaaactagcagacatttaaacatgaatgattaggatttttctatgtggttaacctggactttctgaacaaagaccaactgagcccctcccagtactctggtggatttttcttcagcaaccattacgcaagtcttagttgtaaccagcaatgttctgtgtgttttatgtttgctttttagttaaaaatcaccaccaccaccaaaaagaaaaacaaaattttttggctcctggattttcaaaacacatggtagacctctctgattttaggcttttattgtttaaagacagtgtctcgctttatgacccacactggagtgcagtgccacgatcatagctcactgcaggcttgacctcccaggctcaagcagtcctcccacctcggcctcctgagtagctgcatgccaccacgcccagctaattttttaactttttgtagagacagggtcttgctatgctgcccaggttggtctcaaactcctggcctcaagctgtcctcccacctcggcctcgcaaagtgctgagattacaggtgtgagccaccctggcctgattttaggctttttttgtactggggagaagagactgtgagccaaagtgtagggtgccaaaaagagctttgtgggatgagattttagggcaaagctggggcagtgtctgacttggcggtggtcatgtgtactgatttaggggaaagatcttgaggttttctcaaataattcacctatccccgtgttccctcaagaaaggtcatgttgacctggaaccataggggaaattggtggggtgtgatcagggtcagccccagctgttgctgcccctgcagtgttttgtccagagcacttgcctgcaggtcaggataggatttcaaggccagttcaggagaaagtcccaacccaccagtgcaaccaacaaaagagtaagttttacctacagcctgggttttcacaagtagcatttttattcctcctgctgtctgacatctgagctccaagctctaaacccaacctgtattatatgcagcagcaggttatctttgttttaaatcacatttgttattctgtacttagtcacctttccgtgtgatctgcatttgaaatgttgtaaacttggtcagtatttccattaaaatatcagggctaatcttgtgtattttttttttgttcctaatgattttatagacaaagactcttggcaaccccaggagaaaaaaaataaagctgtcagtggagtactagggatgagaatgaaactggaggtctgtttctggtattatggcttcccgggactctacagtcctgtatggtgaaatacatttttccattgggatcgtcaatgccatgactgttctgccacctcaaactccagagtttctggtgatgtgcaagagttagcaatatacattcagtaaagcgtgtaatcgagtaagtcgtagtaacttgggcgtaaagctctaccaccctgctcactaacaccctgatctccgtccggtatgaaaacacctattccgggtagtctggctccacgttaagcaaacaccactttccgtgttcaccgacagctagagccagaggtctcccggttgctgcttctgaggctgggtctgcagcagctgaggctcccgcctgtcttgccgaatggcctaagtctctgtcttgagactttcgagagttctaatcgtcaaatttcccattttattttgagattttccctgcggcccactatttcggacaacataggagagcctcaaaaacagtttctagcttccaactcggctcaaagttcagacagcagctgggcttccgagagccgccggtgttccaagaaaagctgcccgggactgggaggcgccctctggacgccggaacctttggtttcctgccgtggagcggaacggtagcgccaggggccttccggaaagaggagcgagagcccggcgatggcggctgcgccggccttgaagcactggcgcaccacgctggagcgggtggagaagttcgtgtcgccgctctactttaccgactgtaacctccgcggcaggtgtggcccctggtcccccgcagccggccgaccgcaaccgtgcgcctcaagctttccttccggggagaaacctaagctgcagccacccgggccgcgggacaaagtgcccgccgcgggcagggcaggggccggggaggagggggtagggaatggactgtgccgcggagcggccaggcagccctcttggcggaggatccagggaaagtgcggccccaccggccagctggcccccaggcggaaacggggcggcctccagcatgtgcccaccggcccgtcccacgcaggctttttggggccagctgccctgtggctgtgctctccagcttcctgacgccggagagacttccctaccaggaggcagtccagcgggacttccgccccgcgcaggtcggcgacagcttcggacccacgtaggtaacgcccagcgggtgggcggggccacaggcctaggggaagtcccaacccagctcccagccacaccttcgttgtctgccctctgccgtagacaactacgtgggatcgagcagcaccctctgctgggagcagcaccctctgctgggaacagctctctggtccctgggtcttcaggggatggttttcattcccacgtggccgcctctggacatcccttaggaagggcaccctagggatcacgaacctttgacgcctctgcctgtttccctcatcttgcttctcaccttgttgctcctttcttgtgactcaaagctgagtaccttgtgacactgcagatgcttggagagtttcaagcccctgccgacactttatccaaggaaggatatcaggataggacttctacctctaggcctatcacaacagctctcttgcagatggtggacctgctggttccgggtggagctgaccatcccagaggcatgggtgggccaggaagttcacctttgctgggaaagtgatggagaaggtctggtgtggcgtgatggagaacctgtccaggtgaggaaccctgtcctagggccaggtatggccacatttcagccctgaaatgactacagcccttcttctgtggactctggagaagccacagctgagttgctctgcccacagggtggtatcaggatttcaggactagggaagttgccacttgggcatctgtgcaattggtccttagtttttattgtgtataatacaaacttataggaaaacatttcaaacagttctagataaagtaatggatctctccttatcacccatcccattccccagctataaccactgttaagtgtcttattcatgctccacccttatcaggtttagtccttatactcctatctagtaggtctttatacccatttacaaattaagaaacagatgtgtagttgactcactcaggttcacacagcttctatttcaaattggactgactctcaatctggggttaagactgttcttcctggctacaagaaggcagagaccatcccttcctcccttcactggctcagcaaatatctcctggtgtccattctgggccatacccttaagcactagggtgtagcagggaatgaggcaaacctgcccctgacttcacggagtttctttcccggtatttatttaggggtgcagaggccaccagaatccacactcaggctgcctaaccccttcccagggcccttcccataagaccatgggtttgccactggtaaacaggggctatttgacggtcatggtgctggctgccatgggagttggggcatctactgccaagggtccctgatttgccaatcttggccctgcttgggagagaggacccagagctgggaaccagatggaggggcctgactccccatggcttacactttacctgaactgtccaaaagcctcaagccttgtctctctcactcccctccctactagggtttaaccaaagagggtgagaagaccagctatgtcctgactgacaggctgggggaaagagacccccgaaggtgagtccctgtgccctggttgaccagtgctgtcagggagggagtaccagtgagcaaggaggagctgaggcccagagtgatctcataagcccgcctctgctctagcacaatcatcctcacatctcattgtttgcttttaaaagcatgattttttcctaaccataaaaataatgggctgggtgcagtgacccacactaccctgggaggctgagtgggaggatcacctgagcccaggaggatgaggctgcagtgagccatgatcacaccgctgcactgcagcctgggcaacagagtgagaccttgtctcaaaaataatagcaatgtttgcctgtggtaaatacaggaaagcacaaagaagtaaataactaccgttattccactccctagaatagagatgaacattattaacatctcagcattcatgttcttttttttgagacgaagtctccctctgtcgccgatgctggagtacagtagcacgatcgcagctcactgtaccttctgcctcccaggttcaagcgattctcatgcctcagcttcccgagtagcagggattacaggtgtgtgccaccacgtccagctattttttttttatttttggtagagaaagggtttcaccgtgttggccaggctactctcaaattcttgacctcaggttatccgcccctctcagcttcccaaaatgctggaattacaggcgtgagccaccgcacctggcccagtattcatgttcttggtgtatctttccggcatagttttttttgttttttcgggggggtttttttggatttttttgagacggagtttcgcttttgttacccaggctggagtgcaatggcacgatctcggctcactgcgaccgccgcctcccaggttcaagcaattctcctgcctcagcctccctactagctgagattacaggtgcccaccaccatgcccagctaattttttgtatttttagtagagacggggtttgactctgttggccaggctggtctcaaactgctgacctcaggctatccacttgcctgagtctcccaaagtgctgggattacaggaatgagccaccgtgcccggctcatcccggtatagtttttactagttaagattgtatcctgacttcttacattccatgttataacatggacattttatgacaccattaaaaacacttcttagacattatgaatgtattttatatagattgaacactgtttcagatgctttcagacactgggagtatggtggtgaataaaatagcccttgccaacaaagggagacagattcactcatataattacaaaactgagggctctggaaggaaatcctgggtactccactgaggaatttgctctagacttagcagcgaagtggagtcaggaaggcctccctaaggaagtcgtgtttgctctctgaagcctaagtatggcatcaccacagcccagcctgttctccaatgaatggcccgcccatgttggccgtgttggttttagatcttgggtctaaaagtttgagcctgggagatccgaacatgattttaatatgcaaagagggttccaagaccaaggcagtgctttgcaaagacaactttggaaatataagactaaacagcagcgtactttacatggttccaaactttgctacttattctctctgacagcaagacatgggatccatctggtgtttgtaccacaaccctcccacatgcactcttg

SEQ ID NO: 97098 - DNA, 84533 bp, Homo sapiens
atcttgggcagaatgagggttagagagagataatcatgcatccttgctttccagagacagatagttgaccccaagttgtcccagtaattaatagcctctctgtcactctcaaaaatcccagattgaatttcctccccggccccagttaaaccatcattctatttatataaattaaacacatacgttccctagagtatccccaacctctagagcactggtcagtaattttcttttttctgtaaagggccagacagtcagtattttcagctttgtgccatacaatctctgctgtaactactcaattctgccaatgtggcgtgaaagcaaccagagatgtacataaaaaatgagcgtgggcccagtgcggtggctcacatctgtaatcctagcactttgggaggccaaggcaggtggatcatctgaggtcaggagtttgagaccagcctggccaacatggagaaaccccgtctctactaaaaatacaaaaattagccaggcgtggtggcgcacacctgtaatcccagctactcaggaggctgaggaaggagaatcgcttgaacccagcaggcggacgttgcagtgagctgagatcacaccactgcactccagcctgggcaacagagcaagactccatctcaaaaaaaaacaaacaaaaaaatgagtgtggctgtgcaccagtaaaacttagacatggatactgatacttgaatttcatataattttcaggtgtcacaaaactgtattcttttgatttttttttcagccatttaaagatgtaaaaactggccgggtgcattggctctcgcttgtaatcccaacaccttggaaggccgaggcaggcggatcacttgaggtcaggagttcaagaccagcctggcaaacatggtgaaactccgtctctactaaaaatacaaaaaaaaaattagctgggcgtggtggcaggcacctgtagtcccagctactggggaggctgaggcaggagaatcacttgaacccaggaggcgaaggttgcagtaagctgagatggcaccattgcactccagcctgggcaacagggcaagactccatctcgaaaaagaatatatatatatatatatatatatatatatatatatatatatatataccatttttggcttgcaggttgtataaaagctggcaatcggctgtggtttgttgctccctgatctagggtaacacctggcaggcaccatggtaggtgctgaataaatgtctggttattgctaagtacacccacagaacaactgtgcatgctttatacagacacatgcagattcaaagacagatgaacaccctagtgagggcctaggagggggaggggagagggactaggggttgggagtaactggagaaaataatgaaataggtcaggcgcagtggcacatgcctagaatcccagcactttgggaggccaaggcaggaggattgcttgagcccaggagttagagaccagcctgagcaacatggtgaaactctgtctctacaaaaaatacaaaaattagccaggcatggtggtgcgtgcctgcgatcccagctacttgggaggctgaggtgggagaatcacctgaacccaggaggtggagtttgcagtgagccgagatagcgccactgcactccaacttgggtgacagagaaactctgtctcaaaaacaaaaagaaaataatgaaataaaataagccaggctttgcccaggctgaggagggtggtgggccatgaactgatgagggcaataaactccactctgctcctaaggcccagaaaggaaaatgaaagtgagacctccagggacagaaaacctaaattttaaattcttttttcattttttttaaggcagggtctcgaactgtcatccaggctggaggtggcaccatcatggctcactgcagccttgacctcctgggctcaagcaatcctcctgcttcagcctcctgagttgcttggatcacaggcagatgccacgacgcccagctaatttttaaattttttgtagagatggaggtcttactatgttgcccagactggtctagaactcctgggctcaagcgatcctcctgccttggcctcccaaagtactggtattacaggcgtgaggcatcacacccagcctagatttgaaattcggacactgctgtcactatctggtgatcttgggtaagttgaacctctagaaggttctttgtaaaataggactaaatatggtacctacttcataggcccgttagggattaaaggaatctatacagataatgtgttcagaacagtgtctggcatttagtaactggtgttacaatgttgtggttgttttctataaagaacagagagcaaattgtcccccaagttccaaataaggagatggattagaggtgattaggagcgtgggctctagaaccaaggacctcagctttgccacagactggctatgtgactctggccaagttacttggcctttctgtgcctcagtttcctcagagaaggtcaatagtagtagtacttggtaaatagagttgaggtaagaattaaatttgccaactctgagcctggtatataaatgctcaaataaattattatgttatcactttggtcgcacaatttctgcccaaggggaaataataaaaggagtcaaaacaacaatctcctgtgaaatattccaacaggtccaaggagttgggctatggattttggacaaagagaagagagcctctaatgtgaaaggaagaccccaatgtgccaggcacggtggctcacgcctgtaatctcaacattctgggaggctgatgcagatgcattacctgaggccaggagtttgagacctgcctggccaacatggtgaaaccctgactctactacaaacacaaaaattagccaggcgtggtggtgggcagctgcagtgcagctactcaggaggctgaggcaggagaatcacttgaacccgggaggcagaggttgcagtgagccaagattgtgccactgcactccagcctgggtgacagagcaagactacatctcaaaaaaaaaaaaaagaatgaataaataaatacaataataataaaaatattgaaggtaaaattggggaaatttcacagaaagtagaatttttaaaattgtaacaacaaaagaaaaaagattttcaaaaatgatgcatcattgtaggaaagtcaatagctaacaggaatttcagaaagagagaaccaaggaatcattggggaaaaagctgtcaaagaaataatacaacaaactttcccagaattgaaggacaaaaatctctataacaaaaagatcaccatatgcccagaacaatgaatgaaaaaagatactcaggaagaccaagtcatcatcttgaatttcattctttttttttttttttttttgagacagagtttcactcttgttgttgcccaggctggagtgcaatggtgcaatctcagctcactgcaacctccacctcctgggttcatgcaattctcctgcctcagcctcccaagtagctgggattacaggtatgtgccaccacacctggctaattttgtatttttagtaaagatggggtttcaccatgttggtcaggctggtctcgaactcctgacctcaggtgatccacccaccttagcctcccaaagtgctggtattacaggtgtgagccatcatgcccagcccttttttttttctttttaagactagtcaagtgcagtagtgagaaaaggggaaagaattgaactgatcaactgagataactgactaccttcagatcagcccatcttgaatttcagaaaatggatgatacggtaagatcatgaaagagtccagagagaaaatgaagattacgttaatgaccaagaatgcaatggatttcttaacagcaataagagaagctaggcgccagcagaaaaatatcttctaagtgttgagtatgaatgaccttcaacctaaaattctgtacgcaaccggactaccaatgacatgtaaatggaataagaccattttcagacatgtaaggaagtctccaggatgacaactgatacaatttccagcaagcaatccaggaaaggaggcatgaagactccaagaaataaaaaaataaaaattacaaactatctggctgggcacagtggctctcacctgtaatctcagcaccttgggaggccaaggtgagtggatcacttgaggttaggagttcaagaccagcctgaccaacagggtgaaaccccgtctctactaaaaaaatacaaaattagtcaggtgtggtggtgcacacctgtaatcccagctacttgggaggctgaggcaggagaatcacttgaacctgggaagcggaggttgcaatgagccaagatcacgccactgcactccagcttgggcaacagagcaagactctgtccccccccaaaaaaatcacaaactagctgacagatttgactatgaagaaaaccttattcaagacatttacacaacttttggagggcataaaatgattatttagatgttcaaagagaacaaagcaaatgaaaaagcaaggcaattattaactccaggaaaaagtaaagttgcacatgaaaagataaaacttgtctcagtcatgaacacaatttatgtagtcataatagtgaaaacattgaatatgtatttaaccaaaaatggtgatattaggtatcagtatattaagaggatggaggaaatgataatgaagtgtgagctaaaaaaccctcattagacataataggaaatcagtagatactttctaaattgaataaatgaaaattttgcaggataaggccaggcatggtgtctcatgcctgtaaccccaacactttgggaggccaaggttgagcccaggagtttgagaccagcctgagaaacatggcaaaaccccatctctagcaaaaatacaaaaattagccaggcatggtagcacatgtctgtattcccagctactggggaggctgaggtgggaggatggcttgagcccgggaggcagaggttgcagtgagctgagatcgagacactgcactctagcctgggtgacagagcaagaccctgtctcaaaaaaattttttttaattgcaggatagatttattattttaaaagatgtaggtatatccataagaaacaactaaaagaatggttacttctgataagggatatggaaggggctggggagaacaagagactgcagtttttttgttatttgtatttatgtactaactggctttttacaaaaaatggttttaaaaacccaagatctagaacaaataagggaggcataccttaattttggcagctaagatgcttaaattaaaaggaaagtaagccgggcgcagtggctcacgcctgcaatcccagcactttgggaggtcgaggaggttggatcatgaggtcaggagatcgagaccatcctggctaacatggtgaaaccccgtctctactaaaaatacaaaaaaattagccaggcgtggtggtgggtgcctgtagtcccagctactcaggaggctgaagcaggagaatggcgtgaacctgggaggcggagcttgcagtgaaccgagattgtgccactgcactccagcctgggcgacagagtgagactccgtctcaaaaaaaaaaaaaaaaagaaagtaaatcgtgataaaataaaaatatcttaccttagtattagtttacctttcaaaagtacttgtgggccgggtgctgtggctcatgcttataatcccagcactttgggaggctgaggtggtcagatcgcttgagctcatgagttcagcaccaggctgggaaacatggtgaaaccccatctctactgaaaatacaaaaaaaaaaagagctgggtgtggtggtgtgtgcctgcagttccagctactagggaggctgaagtaagaggatggcttgagtccatgaggcagaggtgatagtgagccaagattgggccactgcactccagcctgaccaacagagccagaccttgtctcaaagaacaaacaaggccggcgcagtggctcatgcctgtaatcccagcactttgggaggctgaggtgggtgggtcacctgaggtcaggagttcgaaaccagcctgaccaacatggtgaaaccccgtctctactaaaaatacaaaaattagctgggtgtggtggcacatgcctataatcccagctacttgggaagctgaggcaggataattgcttgaacctgggaggccgaggttgcagtgagctgagatcacgccattgcactccagcctaggcgacaagagcgaaactccgtctcaaaaaaataaacaaacaaacaaaaaaatgcttctgacaacaacctaatgccctgattctgatttctaaatcgtttttcccactataagaaaccagagattggcagggcacgatggctcacgcctgtaatcccagcactttgggaggccgaggtgggcagatcatgtgatcaggaatttgagaccagcctggccaacatggtgaaaccctgtctctactaaaaatacaaaaattagccaggtgtggtgtcatgtacctgtaatcccagctactcaggaggctgaggcaggagaatcacttgaacctgggaggtggaggttgcagtgagctgagatcacaccattgcactccagcctgggtgacagagcgagacttcgtttcaaacaaaacaaaacaaaacaaaacaaaacaaaaaaccatagatcctttgaggaatggctgattccagggatacagcagggaaaatataagacaagcccggtacatcttggtggtccagaaggcaagaatgtgctcaaaggctaacagagacacatccaatggacttagagtcagtttaaagggtttccacagagcctgagtaaaataatgtgatcattagaaacattaatgactataacctattttgaaacactaaataaataaaaatgcaagagttcatagtgattattattattattattagtttgagacagggtctcactctctctcctaggctggagtgcagtggcatgatcttggctcactgcaaccttcgcctcccggctcaactgattctcccacctcagcctcccaagtagctgggactacaggtgtgcaccaccacatctggctagtttttaaattttctgtagagatggggtctccctatgttgtacaggctggtcttgaactcctgggctctagcaatctacctgcctcagcttgccaaagtgctaggattataggcctaagccactgcacccagccatgactatttttaaacaagaaaaaaatacaattaatttgtcactattggaggtgattattgtgtcagtctatcctgaaaattgataaaggattaagcagttaggaggaactgtggttcatctccaggtgatgaaggaaaattctttacaaaagaatatagacgtaccggagaagagttgactcatgccagtaatcccagcacattgggaggccgagacgggaggatcgcttagggccaagaacatgagaccaatctgggcaacataggaagaccccatctctacaaaaaattttaaaaataaaaaaaattagccagacatggtggtgcacttgtagccccagctactctggaagatgaggcaggaggatcgcttcagcccaggaggccaaggctgtggtaagccatgattgcaccactgcactccaaggtgagcgacagagtgagaccctatccctaaaaaaataaaaataaaaacagactgggcgtgatggctcacccctgtaatcccagcactttgagaggccaaggcgggtagatcacgaggtcaggagtttgagaccagcctggccaagatggtgaaaccccatctctactaaaaatacaaaaattagctgggtgcagtggcaggtgcctgtagtcccagctacttgggaggctgaggcaggagaatcacttgaacctgggaggcagaggttgcagtgagccaagatcgtgccactgcactctagcctgggcaacagagcaagaccccgtctcaaaaataaataagtaaataaataaaataaaaaataaaagcaaataaaactttccattttgtaacccccaataaaataacagagtaaggcaaggatcatcagtggatgctaaaccattaggtgaaaggatgtagtgaaatgggatgtttgccctgtgccaatgtatcatctagagattactggaattttgcaaaggggggaaatacatcttttccgtggagagatctagtggtcacagtcttttttttttttttttttttgagacggagtctcgttctgtcgcccaggctggagtgcagtgacgtgatctcggctcactgcaagctccacctcccgggttcacgccattctcctgcctcagcctcccgagtagctgggattacaggcgcccaccaccacacctggctaattttttgtatttttagtagagacagggtttcaccgtgttaaccaggatggtctcgatctcctgacctcatgatccacccacctcggcctcccaaagtgctgggattacaggcgtgagccaccgcacccggccagtggtcacagtcttaattgagagatcaaatttagcatcactaaaagtgaaacagccagacattatgtggctcttgataaggagcattgggatattcaaggctttgcccaagaagtgttgtggccattgtgtttaacctggatgtgatcgtgtctttagatctaacttccagtatgcaggaaaaatagggaatagaggagtgtgctgagtaatacaacagggaagcaaccagatgaattcagaaggtgcgacattctacaaactacctgaccagagctcttccaaaagtcagtatcttgtatagggagattattctagattttaaaaagattaatggacatactaagcaaatgtaatgcatgaagcttaattggatcctattttaagaaaatacaggctgggcgcagggactcacacctgtaatcccagcacttttggaggccgaggcgggcagatcacttgaccccaggagtttgagaccagcctgggcaacatggtgaaacctcatctctataaaaaatacaaaaaaaatatcctggtgtggtgggatgcacctgtagccccagctatccaggagactgaggtgggaggatcatctgagtcccggaggtcgaggctgcagtgagccaggattgtgtcactgcactccagccttggtgacagagtgagacctgtttcaaaaaaaaaaaaaaaaagaaaaggaaagaaagaaagaaaagaaaaagaaaacagctataaaagacatttgaggggaacaattgtagaaatttgaatgtggaccaggtattagatgatagcaggaaataattattcattttctcttatgattatcattgtggttatgaaggacaatattcttgttcttaggagaagcaggatgaagaatttaggagtgaaatgctgtgatgtctgcaatttactttctttttggtgggtaattgggggagatggggtctcactctgttgcccaggctggagtgcaatagtgcagtcttggctcactacaacctctacctcttggcaccacagcctcctgagtagctggaactacaggtgcatgccaccacacctggctaatttttgtagagacaggtctcgttatgttgtccaggctggtctccaactgcaatccgcccacctcggcctctcaaagtgctgggattacaggcatgagccacagcgccctgcaaatgtactttcttttctttcttttttttttttttgaaacggagtctcactctgtcacccagactggagtgcaatggcacgatctcggcccactgcaacctctaacttgcgggttcaagtgattctcctgcctcagctcccgagtagctgggattacagtcgcctaccactgcacgtgcccagctaatttttgtatttttagtagagacggggtttcactgtgttagccaggatggtctcgatctcctgaccctgtgatctgcctgcctcggcctctcaaagtgctgggattacaggtgtgagccactgcgcccggccaaacacttataatctgaatcaaatcatgaggaaacatcaggcaaccccaaattgagggacattccaaaaacaaagcaagcctgaactcttcaaaagtgccaatggcatgaaagacaaagaaaggctgagaaagtgttctagattgaaggagttgaaagagccacaatgatggaatacaatgttcctggattggatcctagatcagagagaaaaattactcaaaggcactttgggaggccgaggcgggctgatcacaaggtcaggagatgaagaccatcctggctaacacgatgaaaccctgtctctactaaaaataaaacaaaaaaattagccgggcgtggtggcaggcgcctgtagtcccagctactcaggaggctgaggcaggagattggcgtgaacccgagaggcggagcttgcagtgagccaagatcgcgccactgccctccagcctgggcgacagagcgagactccatctcaaaaaaaaaaagaaaaattattcaaaggacatgttttgtttttgtttctttcttttttttttttttcttgagacagggtctcactcttgtcacccaggctggagtgcagtgatgtgatcactgctcactgcagcctcgacctccccaggctcaggtgattctcccacctcaaccacccaaggagctgggactacaggtgtgaaccaccatgcccggcttatttttttttttttttttttgtagagatggggtttcaccatgttgcccaggctaggcctctaactcctgggctcaagggatctgcccacccacctcagccttctaaagtgctgggattacaggtgtgagccaccacagcaacctgtttttgtttctttttctgcgggggcgggaagggccaaattttaaaatggttgtatattagaaaagagtgttacattaatgttaaaatcccgaatttgataacagtattgtgattgtgtaagagaatgtctttgtccttaggaaagacaaactttttagaggcaaaggggcacgcagtctgtcattaatctcaatggataagtaagaacatatatgttattaattaattttttttttgagatggagtctcgttttgttgccccggctggagtgcagtggcgtcatctcagctcattgcaacctttgcctcctgggttcaagtgattctcccacttcagcctcccaagtagctgggaatacaggcatgagccaccatgcccagataatttttgtatttttagtagagatggggtttcaccatgttggccaggctgatcttgaactcctagacctgaggtgatttgcccaccttggtctcccaaagtgcgggattacaggcgtgagccactgcgcccagccattttattaatttacatgtctagagagagtgagtgatagaccaaatgtgacataatgtaatcagttgatgaatctggatgaagggaacacagcagtgctttgcactattcttggaactctatcataaattttaaattatttcaaagtaaaaaatttgtttttaaaatctaaattagacctagactatttgggaaggcagcttctaattttggcaggagctaaaaacatggagatgaagaggaaattaatcttgatacaataaagatttttattactttattactttattacttgctttgtcgcccaggctggagtgcaacagcttggctcactgcaacctctgccacctgggctcaagtgatcctcccaccacagcctctccagtacctgtaaccacaggtgtacatctccaggtccggctaaattttgcattttttgtagagatggggtttcaccatgttgcccaggctggtctcgaactcctgggctcaagtgatctgtctgcctcggcttcccaaagtgctgggattacaggtgtgagctactgtgcctagcctaaagctacttttttttttttgagatggagtttcgctcttgttgcccaggctggggtacaatgtctcagtcttggttcactgcaacctccgcctcctggtttcaagtgattctcctgcttcagcctcccaagtagctgagattagaggcatgcgccaccacgcccggctaattttgtatttttagtagagacagggtttctccatgttggtcaggctgaacccgacctcacatgatccgcccgcctcggcctcccaaagtgctgggattacaggtgtgagccaccactcccggccctaaagttacttttatttaaatatctttattggctgggtggtggtatgtgcctgtaattctagcatgtgggaatgccaaggtgaaaggatcacttgaggcaaggaattcataaccagcctaggcaacataatgagaccctgtctttacaaaaaagtttttttaattagccagatgtggtggtgcacacctacataaataaataaataaataaataaataaataaataaatagggccgggcacagtggctcacgcctgtaatcccagcactttgggaggcggaggcgggcagatcacgagctcaggagactgagacacggtgaaaccccgtctctactaaaaatacaaaaaattagccgggcgtggtggcgggcacctgtagtcccagctacttgggaggctgaggcaggagaatggcgtgaacccgggaggtggagcttgcagtgagccgagattgggccactgcactccagcctgggtgacagagcaagactccgtctcaaaaaataaataaataaataaataaatctatgtatcattattgccctagtatttctttcagttttgtcttttttttttttttcttttgagacagagtttcactcttgttgcccaggctggagtgcaatggtgtgatcttggctcactgcaacctctgcctcccgggttcaagcgattctcctgtctcagcctctggagtagctgcgattgcaggtgcctgccacaatgccctgctaattttttgtatttttagtagagacggggtttcacaatgttggccttgaactcctgacctctggtgatccacccacctcggcctcccaaagtgctgggattacaggcgtgagccaccgcgcccaggcttctttcagttttcaggaatgttgtggagctgtgtcctgtttgcctcatggagctgatgagctgggagaattcaagggggttgatggaaggggagaaggtaagtccccaagtgacccagttgaaaaccagggcctgggccaggcacagtggctcatgcctgtaatcccagtactttgggaggctgaggcgggaggattgcttgaggtcaggagttggagactagcctggccaacatggtgaaacctcgtctctacgaaaaatacaaaaattagccaggtggggtggtacacgcctgcagtcctagctacttgggaggctgaggcaggaaaatagcttgaacccgggaggcagaggttgcagtgagctaagattgtgccactgcactccagcctgggcgacagagcaagactctgtcttgaaaaaaaaaaatgttgtgtttcaaacaacttttgacaatcagtgctgtaaagctgaatcccagagacaactgagataggagcaggaagatctgtggtccagtctccctctggccttataattatcttcctgagttacttaccttctttgagacagtgtttgcttgtcctcccaactagcctgaaaagttcttaggagaagggccagcctttggggtcatgttcctgtgtgacctgtctctaggaacttctgcatacccagctctgcccacttggagctagtgtccaggactccacagcactacccgcactaaatacctcggtctcagtcttgtgacagaaagtggccagtgtggtggacatagtgcagaggtttagggtctgaccaacctgggacagcaatttatgggctaggtgacatccttgagcaactgtatgacctcaggcctgtcatatggtctctgagcctcaggtttttcttctgtaaaatgggagtgataaaaccgacttctctgctgggtatggtggctcacgcctgtaatcccagcactttgggaggctgaggcagatggatcgcttgagctcaggagttggaggccagcctgggtaacatgtcaagaccctgtctctacaaaaaatataaaaaattggctgagtgtggtggtgtgcacctgtggtccaagctactccggaggctaaggtgagaggatcgtttgacccctggagttagaggttgcagtgagccgaggtcactgcactgcactctagcctgggtgacagagtgagaccccatcttaaataaataaataaagtattttgtgtaaacacttgtaactgtatttcattgagtgtgatacatgtatatacaaagaaatataaatagttgccagttaaactatgacacatcatcatcaactggaactggaactgaaatcacatactgacttcagcaacgtgaaacattggccggtcgcggtggctcacgcctgtaatcccagcactttgggaggccgaggcgggcggatcacgaggtcaggagattgagaccatcctggctaacacggtgaaaccccgtctctattaaaaacacaaaaaaattagccgggcgtggtggcgggcgcctgtggtcccagctactcaggaggctgaggcaggagaatagagtgaacccgggaggcggagcgtgcagtgagccgagatagcgccactgcagtccagcctgggcaaaagagcgagactccatctcaaaaaaaagaaaaaagaaaaaaaaaagaaatgtgaaacaaaggccgggcgtggtggcactttgggaggccgaggtgggcggatcacctgaggtcaggagtttgagaccagcctggccaacaggggttaaaaatacaaaaattagccgggcatggtggtgcatgcctgtagacccaactactcaggaggctgaggcaggagaattgcttgaaccggggaggcggaggttgcagtgagctgagattgtgccactgcactccaccttaggcaacagagggagtctgaaaaaaaggaagagaaaagaaagagagagagagagaaagagagagaggtagggaggaaggaaggtgggaagggagggaagggggggaagggagggaagggaggaaaggaagggaaggaaaggaaagaaaggaaagaaaagatagaaaagaaaggtggctcgtgcctgtaatcccagcactttggggagctgaggcaggcggatcacttgaggccatgagttcgagatcagcctggccaacatggccaaaccctgtctctactaaaaatacaaaaattagccgggcatggtgtctttgcacgcctataatcccagctatcccttgaacctaggagttggaagtggcagtgagctgcagattgcgccactgcactccagcctgggggacaagagcgagactccgtctcaaaaaaaaaaaaaaaaaaagtgaaacaaaaagtgtgccttaaaatagatgaagtactgtattattattattattaaagggctggagccagaacaagttagcattttgtgcctcgagattcaaatcccaggtctaccatttattccttgggtgacatttttttggggggaggggctggaggacagggtctcactctgtcgcctagactggagtgaagtggcgcgatctcggctcaccgcaacctccgcctaccgcgttcaagcaattctcctgcttcaggctcccgagtagatgggactacaggcgcgcgccactaccgcccggctaatccttgcgtcactttaagcaagacacttgatctctctgtgcctcagtttcctcacccgcagaatgaatatcaatagttcctgctacacaaaactgtttgggctattaaatatgtgaatactcagaaagtacctggcacaaagtagccttatcattgctattatttagaacaaagttattgtttccaggtttggaggtgggctggcggagggaggagaagacgcactaggttgcctttcagaaaaggggtccaggccttatcctgcctcccaggtggactcggcccgggatcccgagccccgccccctccaggccccgccccgccccgccctcgctggccgagactctgtgctactctcgcgcgctttgaaagtgcgcgagctccgaccgagacctgggccggcggttggtcggccgaaaccatctgctacgttacgtggggggaggtcagctcctatacagccacacttttttcaatcttcagcttttcaggcctaggtcctggttttattttagctttcagagcttctctgtaggctygaatttccaggaggcagcccgagtccctggggagagggtcatcgtggctctcgtcggtgccttccacctctggacaggcaaccggtgggagaggacgccggtgggcggggggaggaggcggccctagcgccattttgtgggagcgaagcggtggctgggctgcgcttgggtccgtcgctgcttcggtgtccctgtcgggcttcccagcagcggcctagcgggtgagtcgcggagccttctcactgaggacgccgtaggtgcctcggcttctgcattggggcggcccgaggcagacgcagcggcttyggaccctgccccgggaagtcagccgtgagaccgggcctagtcctgcccgagcgggctcgcgcgggagcgtcgttaggtcctggcacggggaggccggtggcgccgaaacggggggccgggcccgcggtgccgcgtagcctgaggcggaggttggccccggacccggacagtgccggagccttcggtactttgtacttcgagggacgctgccagcttgggcctggtgctcctgcgccccaccccgggccgcgccgagaaactcctccctcggctggcacgcgcgggcttctgggaggcgacggccggcaccgccaggacctgtcgccgcgggccttggggctcgggctcgcagagcccccggaagccccaaaatgaggaacagagggaaacttttctcctgttctttacacctggttcactgcccatattcagtcttcaggttcagctgatggatcgcttgcttaggaaaatcgactgggacctatcacgcccatgcctcagccagttaggctcctcctctgccttcaggattacttaacgactaacccgattgtcataaaatagctactgtttattgttcccttgcataccctagcttgtaaccagcaagccacgttggactcagttacagtttcagtacctgacgcatcataagccttcagggaaagttttttgaatgaatgaactggcgaggcatcacattttgataggaaatcactacccttaccttcacctcgtcatttttcagggataaccaatgcatatacgaatccagacaagcatttttctggaagtcagaactctgacatrgtttgggtattatcattataaggaaacagttattctgacatgaatgttgttcattcatatctcttttctctttaggaaaagtaaaagatgtctgaatatattcgggtaaccgaagatgagaacgatgagcccattgaaataccatcggaagacgatgggacggtgctgctctccacggttacagcccagtttccaggggcgtgtgggcttcgctacaggaatccagtgtctcagtgtatgagaggtgtccggctggtagaaggaattctgcatgccccagatgcyggctggggaaatctggtgtatgttgtcaactatccaaaaggtttgttaccatttggtttttgtaatcatgctgaagtgtgttcaggtgtgtgtctcatccatggatcttagcctcttttggtggcagaatgtctcctgaaacttaagtatttccttgaacttcagtgttagacaagtttggaagaccacgagtctaaatttatggaaactggggattgtagatcattttaaaagagaaaacaatgtatttaaaaaatatctgaataarctttgccaagttgatgataaatttcaggaatcactaagaatgttttgtacataaatcattgttgtaaatagattcttctgaagtgcttcagtgtttggatttgatcattgtccttttggtgttacatcattcattcagcaaatctgagttcattttttcccttaaatgarcaaacagttggagtagccaaatcttgaattagtgcagttccaattacaatttcgaggttctggtcttatccttctctctgcctcttatcaatgatgttctaaatctaagaaaaggaagcatgaagtttaagaagtgtgccaaggaaatacctaatttcagcrttttgaagtagtgtgctgttagtagtcgatctgtctgtgtgttccttttattataacttggtattgcaacaaagtccatcaaatttggtcagtatgcaagacacccttttacatgtctaggaaaactttagggctaggcacggtgactcatgcctgtaatcccagcactttgggaggccgaggcaggtggatcacctgagatcaggagtttgagatgagcctggccaacatgatgaaaccccatctctatcaaaaacacaaaatctctggatgtggtggtgggtgcctgtaatactagctactcaggaggcagacgcaggagaatcgcttgaaccgggaggcagaggttgcagtgagcagagattgtgccattgcactccagcctgggcaacaagagcgaaactccgtctcaaaacaaaaaaaacgaaaacaaaaattggcgtggtggcgggggcctgtagtcccagctagtctggaggctgaggcaggagaatcgcttgaacctgggaggcggagattactttaagctgaggtcgcgccgctacactccaacctgtgacagagcaagacttcgtctcaaaaaaaaaaaaaattgataatgtaaactcggggtttttagtatgctgtttcttcagccagtgggtatagattaatatttactcaaatttaaaatgtcaggctcggtgcaatggctcacacctgtaatcccagcactttgggaggctgaggcaagcagatcacctgaggtccgaagttcaagaccaccctagccaacatggtgaaacccygtctctactaaaaattcaaaaattagccaggcgtggtggttcgcgcctgtagtctcagttatttgggaggctgaggcaggagaattgcttgaaccgggaggtggagattgcagtaagctgagatcgtgccactgctctcyggcctggcagcagagcgagacaccgtctcaaaaaaaattttttaaatgtcatttaatttatctccccaggctggacatggtggctcacatctgtaatcccagctactcgggaggctgaggcaggagaatcacttgaacccgggaggcagaggttgcagagaggggagattgcgccactgcactccagcctaggtgacagaatgagactccgtctcaaaaaaaaaaaattatctccccttctcttctaaataacctaaggttgaggttatttggggggtttttttgttgttgtttgtttgtttgttttttgagacagtctcactctgtcgcccaggctggagtgcagtggcacgatcttggctcactgcaacctccgcctcccaggttcaagcaattctctgcctcagcctcatgagtagctgggattacaggtgcctgccaccacgcctggctaatttttgtatttttatttatttatttttatttgtttatttattttttagacgaagtctcgcccttgtcgcccaggctggagtgcagtggcacgatcttggctcactgcaacctccgcctcttgggttcaagcgattctcctgcctcagcctcccaagtagctgggattacaggcacctgccaccacgcccggctaattttttctttatttttagtatagacggcgtttcaccatcttggccaggctggtcttgaactcctgaccttgtgatccacctgcctcagactcccaaagtgctgggattacaagtgtgagccaccgcgcccagccagttatgtttttttaagtaagccaaacttttggtttctttttcttttttgaaattagagatggaggctctcgctctgttgcccaggcatattgcagtggctattcataggcacactgcagcctcaaactcctggactcaagtcgtccttcctcctcagcctcctgagttgctggaacttacaggcatacacaccactgtacctggttttctgttttattacaaaagttgtgtatttgttgttgaatgtttaggaaagataaaagttaaatcttcatcaggatatacaagttgctgatatttaaagtcaaagtgaagtagaattatttttgttttgataaaccttttgagagggagagattgtaatccggaaatgctacaaaaaacaaacttggaaatcactgaatttgcaccagaaaagcacctcagacactaaacttaagcctttattctgtcctctagagcaaacatcacttcttgccaagttttcagtgtcttattcttcttagagtcttctttttgcttctcatttctagatgtaggaggtagtgtttttaaagaagtgctaagtgaagatttctaaaaggtttctgctcgttttatttagataacaaaagaaaaatggatgagacagatgcttcatcagcagtgaaagtgaaaagagcagtccagaaaacatccgatttaatagtgttgggtctcccatggaaaacaaccgaacaggacctgaaagagtattttagtacctttggagaagttcttatggtgcaggtaaacttcgattgcatcaaacagtttttctttaccagtgaatgagtatctagcatttatttattggtataaatagagatggggtatcactatgttccctaggttctggcgtcaaactcctgggcccatactgtcctcctgcctcgaccccaatgtgctgagccaccatgcccagccacaatcttgttacctttctttttttttttttttttggagaccaagtctcactttgctgcccaggctggagtgcagtggcacgatcttggctcactgcaacctccacctcccgggtttaagtgatttctcctgtctcggcctcctgtatctgggattacaggtgcccgccatcatgcctggctaattttgtatttttagtagagacagggtttcacccgttggccaggctgttcttgaactcctgacctcaagtgatccacctgccttggcctcccaaagtgctgggattacaggtgtgagccaccgcgcccggccacattcttgttattttaatggcactgtcctttctgttacacagatgatacttccaatatttgttatatttatacatatatgttgtaccctatgttattgcctttgatattgtaaaatcctactgttgcatgaaggcttaagggaagtaggtgacaatagcttttctttatatattaaactaatgggaggtttttccatttcatttaaaatttgtaaacattaaatttagtttatctttgaattcattctaagacattctgttaaaatcctgttgtggtggctcatgcctgtaatcccagcattttgggaggctgaggtgggagggttgcttgaggccaggagttcaaggccaccttggcgaacatatccagactcagtttctcttttttctttttttttttgagacggagtcttgctctgtcacccaggctggagtgcagtggcatgatctcggctcactgcaagctccgcttcccgggttcatgccattctcctgcctcagcctcccaagtagctgggactacaggtgcctgccaccacgcctggctaattttttgtatttttagtagagatggggtttcaccgtgttaggcaggatggtctcgatctcctgacctcatgatctgcccgcctccgcctcccaaagtgctgggattacaggcgtgagccactgtgcctggcctctctttttttcttttctttttggagacagggtctggctctgtcagtcaggctctagagtgcagtggtgcaatctaggctcgctgcaacctccacctcctgggttcaagctattcttgtgcctcagcctcccaagtagctgggactacaggtgcatgctaatctttgctacaggtgcacctggctaatctttgtattttttgtagagacagggttttgctgtgttgcccaggctggtcctgaactcctgtgctcaagcgatccaccctcctcagcatcccaaagcactgggaatacaggtgtgagccaccgcgcctggccccatctctcttttttaaaaaactcaaaaacatttctgttgtataagtgagttttgctctgttgttaacacagtatggattcaatattaacctccttgtttttactgttaagactaacttggtttaagttttaagccactgcatccagttgaaaccattcaaattgttttctaaggaactrtgatttgggaatggagtgtgtgagtatgtgcacttttagagtaaacttgtatcatcctttctaggtcaagaaagatcttaagactggtcattcaaaggggtttggctttgttcgttttacggaatatgaaacacaagtgaaagtaatgtcacagcgacatatgatagatggacgatggtgtgactgcaaacttcctaattctaaggtacttgcgtctgtgctttgggaatttttgccaacaaacttccttagaggattgtaagataaaatgttaaacacacttagaaaagatagcggcagggtgtgttcatgaaatccttttgtcttgttgaagtctttggcccttagtgcrtgctgaatattttatgcttgtttgaaatatttagtttattacttctccaaactaaacctttgttcattttgttcttccttttcgctatggatggaaaagagaaaaggttatttgtcaagttaatagtttcttacatagttatatgttaaaacataaagagaatcagaatacatacattaattgttataaagacctaactttttccaagcaaacaaataacattggcttatttggaacatcatcatctttgccaagagattgcttatttattaattttctcaaatccaaacacagtcatgtatcacatgkcaaagttgatcagtcagcagcagaccacgtgtacagcagtggtcccataggattataacactgtttttactgtaccctttctatgtttagatacacaaatacttaccatcatgttatagtcgcctacagtgttgagtacagtaacttgaaagtttgtggcctgggagcaataggctataccatctagcctagatgtggggtaggctatgctatctgggtttatatgatgtttgcacaacgactttttttttttgagagagagagtctcactctgtcatccgggctggagtgcagtggtgcaatctcagctcactgcaagctctgcctcccgggttcacgtcgttctcctgcctcagcctgccgagtagctgggactacaggtgcccgccaacacgcctggctaattttttgtatttttagtagagatggggtttcaccgtgttagccaggatggtcttgatctcctgacttcatgatccgcccatctcgggctcccaaagtgctgggattacaggtgtgagccaccgcacctggccctttttttttttttttgagatggagtttcactcttgttgctcaggctggagtgcaatggtgcaatcttggctcactgcaacctcctcttccgggttcaagtgattctcctacctcagcctcccaagatgctgggattacaggtgcctgccaccacacccggctgatttttgtattagtagaggtggggtttcaccatgttgaccaggctggtttgaactcctgacctcaagtgatccacccgcctcggcctctcaaagtgctgggattacaggtgtcagccaccacacctggccacgatgatgaaattgtgtaatggctcatgatgtatttatatccatcattatgtgatgcatgactgtgtacttttgtaacttaaaacgttactcttcactgaagccttacaagaaaaagaaatgctgatggaaaaaattaagggtacgtctactttttaatggttcactgctatccaaggcgaatgattttgttatatcccttaccttaatgtttttttcattgttcataacatatttctgagtttttttcttccttttgatttgatcagcaaagccaagatgagcctttgagaagcagaaaagtgtttgtggggcgctgtacagaggacatgactgaggatgagctgcgggagttcttctctcagtacggggatgtgatggatgtcttcmtccccaagccrttcagggcctttgcctttgttacatttgcagatgatcaggtatttttctccttaacgatatgtcccggccgggcgtggtggctcatgcttacaatcccagcactttgggaggccgaggcgggtggatcacgaggtcaggagatcaagaccatcctggccaacatggtgaaaccccgtctctattaaaatacaaaaaaaaaaaaaaatagctcggtgtggtggtgcacgcctgtggtcccagctactctggagcctgaggcaggggaatcgcttgaacccaggaggcggaggtggcagtgaactgagatcacaccactgcattccagcccagtgacagagtgagactctgtctcaaaaaaaaaaatatgtcccaggtaattaggtaatttctcttgaacattgcccatgcagctaattgctattcttagctaagttttctgaccttgtaagacgtagggtgtatgggcctagatgtttgtgatacctgtatctgatatcacaaatacaacattttaagaaatctaaaagtaaatatgcctttagataattttcagtatgtggcatttgggaatgttatatacttttttttttttattgagacagagttttgctcttgttgcccgggctggagtgtgatggcgcgatcttggctcgctgcatcctccacctcatgggttcaagcgattgtcttggctcagcctcctgagtagctgggattacaggtgcctgccaccacgcctggctgatttttttgtgcttttagtagagacagggtttcaccatgttggccaggctggtctcgaactcctgacctcaggtgatctgcccatctcagcctcccaaagtgctgggattacaggcatgagccaccacgcctggccagttttttgtatctttagtagataacggggtttcactgttttgatctggctggtcttgaactcctgacctcaggtgatccacccccctcagcctcccaaagtgctgggattacaggcgtgagccactgctcctgctcccggcccattttttaaattattattttgagacagggtctcactctgttgcccaggctggtggaacacagtggtgtaatcatagctcactacaccctagaactcctgggctcagcctccagggggaggatcctccagcttcagcctcccaagtagctaggacagatgcatgccactacgcccagctaatgtggcttttttgtggttttttttgatagaggtggggtctccctgtgttgtctaggctkccaggctagtcttgaactattggcctcacacagtcctcccaccttggcctcccaaagcgctrggattrcaggcatgagccaccatgcccagcctatgtcttttgaaaatcgactgaaatatcactgctgctgttaataaaactaaaagctgtattgggggtttaaatgaaatgatgttcattgcttatttttcctctggctttagataaattaatgcttgtaatctaagttttgttgctactttaaatatatgaatcagtggtttaatcttctttgtttacatcccttatttcttatagattgcgcagtctctttgtggagaggacttgatcattaaaggaatcagcgttcatatatccaatgccgaacctaagcacaatagcaatagacagttagaaagaagtggaagatttggtggtaatccaggtggctttgggaatcagggtggatttggtaatagcagagggggtggagctggtttgggaaacaatcaaggtagtaatatgggtggtgggatgaactttggtgcgttcagcattaatccagccatgatggctgccgcccaggcagcactacagagcagttggggtatgatgggcatgttagccagccagcagaaccagtcaggcccatcgggtaataaccaaaaccaaggcaacatgcagagggagccaaaccaggccttcggttctggaaataactcttatagtggctctaattctggtgcagcaattggttggggatcagcatccaatgcagggtcgggcagtggttttaatggaggctttggctcaagcatggattctaagtcttctggctggggaatgtagacagtggggttgtggttggttggtatagaatggtgggaattcaaatttttctaaactcatggtaagtatattgtaaaatacatatgtactaagaattttcaaaattggtttgttcagtgtggagtatattcagcagtatttttgacatttttctttagaaaaaggaagagctaaaggaattttataagttttgttacatgaaaggttgaaatattgagtggttgaaagtgaactgctgtttgcctgattggtaaaccaacacactacaattgatatcaaaaggtttctcctgtaatattttatccctggacttgtcaagtgaattctttgcatgttcaaaacggaaaccattgattagaactacattctttaccccttgttttaatttgaaccccaccatatggatttttttccttaagaaaatctccttttaggagatcatggtgtcacagtgtttggttcttttgttttgttttttaacacttgtctcccctcatacacaaaagtacaatatgaagccttcatttaatctctgcagttcatctcatttcaaatgtttatggaagaagcacttcaytgaaagtagtgctgtaaatattctgccataggaatactgtctacatgctttctcattcaagaattcgtcatcacgcatcacaggccgcgtctttgacggtgggtgtcccatttttatccgctactctttatttcatggagtcgtatcaacgctatgaacgcaaggctgtgatatggaaccagaaggctgtctgaacttttgaaaccttgtgtgggattgatggtggtgccgaggcatgaaaggctagtatgagcgagaaaaggagagagcgcgtgcagagacttggtggtgcataatggatattttttaacttggcgagatgtgtctctcaatcctgtggctttggtgagagagtgtgcagagagcaatgatagcaaataatgtacgaatgttttttgcattcaaaggacatccacatctgttggaagacttttaagtgagtttttgttcttagataacccacattagatgaatgtgttaagtgaaatgatacttgtactccccctacccctttgtcaactgctgtgaatgctgtatggtgtgtgttctcttctgttactgatatgtaagtgtggcaatgtgaactgaagctgatgggctgagaacatggactgagcttgtggtgtgctttgcaggaggacttgaagcaragttcaccagtgagctcaggtgtctcaaagaagggtggaagttctaatgtctgttagctacccataagaatgctgtttgctgcagttctgtgtcctgtgcttggatgctttttataagagttgtcattgttggaaattcttaaataaaactgatttaaataatatgtgtctttgttttgcagccctgaatgcaaagaattcatagcagttaattccccttttttgacccttttgagatggaactttcataaagtttcttggcagtagtttattttgcttcaaataaacttatttgaaaagttgtctcaagtcaaatggattcatcacctgtcatgcattgacacctgatacccagacttaattggtatttgttcttgcattggccaaagtgaaaatttttttttttcttttgaaatctagttttgaataagtctgggtgaccgcacctaaaatggtaagcagtaccctccggctttttcttagtgcctctgtgcatttgggtgatgttctatttacatggcctgtgtaaatctccattgggaagtcatgccttctaaaaagattcttatttgggggagtgggcaaaatgttgattattttctaatgctttgtagcaaagcatatcaattgaaaagggaatatcagcaccttcctagtttgggatttgaaaagtggaattaattgcagtagggataaagtagaagaaaccacaaattatcttgtgcctgaaatccattaagaggcctgatagctttaagaattagggtgggttgtctgtctggaagtgttaagtggaatgggctttgtcctccaggaggtgggggaatgtggtaacattgaatacagttgaataaaatcgcttacaaaactcacactctcacaatgcattgttaagtatgtaaaagcaataacattgattctctgttgtacttttttgtaactaattctgtgagagttgagctcattttctagttggaagaatgtgatatttgttgtgttggtagtttacctaatgcccttacctaattagattatgataaataggtttgtcattttgcaagttacatgttttaaacatttatcaatgaagtcatcctttagacttgtaatcgccacattgtttcattattcagtttcctctgtaaagggatcttgagttgttttaattttttttttctgcatctgaatctgcatgatttccaaaccctgtaccatctgaattttgcattttagcacttgcactattactcagcagcagtaacatggtaacacttaaaatggtactcggggacctccaaagactaaactgacaagccttcaaggagcccaggggtaagttaacttgtcaacggcatggtttaatcccttctttacacttgtgtaaatttcagttactggtcatagaaggctttcaatgttgagtggccttttattaacatgtttatggtactgcatagatacgggtatttattttaccctaagaagattttgaagtttaaaagtacttaaactatttggcaaagatttgtttttaaaaatctatttggtcaatctaaatgcattcattctaaaaaattttttgaaccagataaataaaatttttttttgacaccacagtttagtgtctggagtcttactggaaaaacacgatttctttttatatgtgatatacagatgctggaaagttacctttaaaaattgagtctctaaagaaaaaagaaaataataaaaattgagtctcaagaagttgtacttcatatgcacaagagaaatgaggccaagactcacagtaagcttttacatggaatggtaacttttagttagactgaaaaacttgaatgttagctattaaaaccttttaggaaggaatagccagctaaaaccaaatgagatttttaaagttaaatcagcacttaagttgtgtccttagtaggaaaaagtaggaagttaactactccgtaatccaagagataatgtgtaacagtaagaatgattttgttgttgttgagtatgagcaaagtagcccctaagtgtgtattagggttctgtacttaactgttgtgtgatgtgtgcttttgttaggcatcactgtgcccaagtatttcatgttcattgtaaagaggaaaaatacagatttctctataatgtcaccacttatttctaattgccacttttcatcttgtggaaatgccatgttttgattcagtcttctgaatttgaacattattcaggttatttccaattgctgggaatatccttactgctaaaataaattcttagcattggaattgctaggtcaaagattatgcatgctttttaagggcttttgaaatgtattgccagtctgtggcctgccaccctccctgaacatgcctggtcttgcttaaaatgtattgccaratagtccttgggaagtttatgttgtctttaacaatgtgaaatagtactactattcacgttccttttgtctgacaatttgataagtgaataattgtatcccaccattytgtagtattggtttttaacatggaaattttagtcaatacctgggctgaagtatcagtgtttccaacctacctacccaaaaaaaggattcaaggttattcctcaatcagtactgccataatatataaagcacttacagagatcaataagaacaagtttaaaaacaaagagcatggacaggcagtttacagaaatgccaacagccagtatgaaaagagactggctttttaaggtaatgaaatgtaatttgagcagtgacattacactgggtgggcaaagrtgactgtcactctcgtggtttatgtccccttgagtcaatgggtaaggctggaattaaactggcaagtggagaaatgacagcagcctcacctggagtctgtttttttgggtggagcaacaactgccatgtccacagtaatgatgaatgcttctcgagccacgtcgctgccaaggtcttcacaggcatttctaaaaatgaagaatccttgactgcagacacgcaagttaaaaatcactaattatgttctcgatccagggaatatagttaataacttttgtgtagactccatactgacctgcttccccacaattcatggaaccccaggacactattcctcccacaaaccacctctctgtttcactatctagaaacaccagtgcccctccgctgtcacctctgcagctgtccttgcccccactttctaagccagcacaaagcatgttagcagttacacttccccttggatagggtggcttttcatatgcagcagtacatttttgatggtcaacaatcggtatgtcgacatacattagatttctagcaagaaaacccctttgggttaatccccatccagatgcagttccaatgtcatctgtcctcataaaggattcagcttcttttcttggcagacaaataggcgtgatgttgctattgattacaactttgttattcaatttaatcagtgctatgtcattgtcaaagccagcatcatgagtataaccttcatgtataaaaacagcttcagaccaggcttgtgtataatgaggtgatagtcttttcagggtgcccattcgaatgtccagggcrgatgcatcatgtttttgctcatagacggcatgagcagctgttaggacccagttgtcatataaaagtgcacctgctgctgtggttccacctaatatcaggacttgccaaggaaaatcaccaggttttgccttttgccctccatatatacgccctcctgttgtgygggctgatagtccacaaactggagaaagaagcagataggtagagagcctttgtaaaaatgtcaatcgtgtttttcttaaattatgaccgccttgaagtatatatttgatgtcaaccaaaaattatattacatgaattggtgggtgacyacctatacaggcaagtgaggctattttaaaacatcacagttcaaacacctgataaaaccttttggtatttcttagctcctcagaaaatgagattagtgaaaactgacttttagaagttattttgttttgctaaaataatttggtctataagattgggaaaattggccgggtgcagtgtcacacctgtaatcccagcactttgggaggctgagatgggtggatcacctgaggtcaggagtttgagaccagcctggccaacatggtgagaccctgtctctactacatacacaaaaattagccgggcgtggtgatgggcacctgtaatcccagccacttgggaggctgaggcaggagagttgcttgaacctgggaggcggaggttgcagtaagacaagtcacaccactgcactctagcctggtaagagcaaaactccatctcaaaaaaaaaaggagattaggaaaattaacagggcaagcaggcattgtctgagcagatggactggatgatgtgcataggaattagaaggatataaccttttcattgtttctgttttcctacttgtaaaatgggtatttatgtaatcctaggaaagcaggaactaaagtcagtatcaggatttgcaaaattacttttacctttgaacatacaaatgttttagaaattagaatgttgcagttgtggctaggaccctgtggattccaaaattttatttttggtctagttgattcttccaaactaagttttattgtatctttattgcaaattaaatacgcccattaatgtagcatatatgtttgctgttgtggtagtgtacttgcattaatacctacagacgttgtgttagccaaatacaggtttaaaaaaactaatttgagccaaataacacaagggtaattaatatattactatctttctgggttttttttttgtttgtttgtttttttttttgagacagagtctcgctctgtcacccaggttggagtgcagtggtacaatcttggctcactgcaagctctgcctcccaggttcatgccattctcctgcctcagcctcctgagtagctgggactacaggcacacgccaccacacctggctaattttttgtatttttaatagagatggggtttcaccgttttagccagactggtcttgatctcctgacctcacgatctgcccgcctcagcctcccaaagtgctgactttttttttctttttctctttttttttgagacagagtctcgctctgttgcccaggctggagtgcagtggcgcaatcttggctcactgcaagctccacctcccgggttcacgccattctcttgcctcagcctcccgagtagctgggactacaggcgcctgccaccacaccaggctaattttttgtatttttttttttttagtagagacggagtttcaccatgttggccaagatggtctcgatctcctgacctcgtgatctttccgccttggcctcccaaagtgctgggattacaggcgtgagccaccatgcctggccctgatttgtttttttaaatcattctacagagggggaggttgcagtgagccgagattgcgccactgcactccaacctggcaagagagcgagattccgtctcaaaaaawaataataataattctactcaactattatctttggagccaattctggttaaaaaaaaaagtactattaaaaggcagattgcattgatgtttaaaaactagatgttgaaaacaattgcttggggaaattatttgctttgggttttaatagcattttaacatagaatagtaactcaacagaagaacttgtgtttataaatgtataagttggtcaagataatttttaaaatctttttttttttttttttttttttggatatggaatttcactactgttgcccaggctagagtataatggtgcgatctgggctcaccgcaacctccaccacctgggttcaagcaattctgcctcagccgctcgagtagctgggattacaggcatgtaccaccacacccggctaattttgtatttttattagagacggggtttctccatgctggtcaggctggcctcaggtgacccacctgcctcggcctcccaaagtgctgggattacaggcgtgagccacacctggcctaaaaatcatttaattttttatgcttgcctagttataaggtcaaagagaatcaaatgactgatgcagtcagcacctaacaacctctgtatatgggaagggggtaatgagaacatactatttggaaataataacagcctaagagccaagtgctgaagttacatttctgcctaccacagctaaagctctcctcactgtctcctacccagtcctcctttccatcaattaccagtctcttgtataaatgtatccattaccaggctcacagactgggagtgatttttctcctttggagctcgtccagaatccatyagcctcacacacatatttacctgcaaatcattggaaaagcaaaaatgtttaactgcatgtataagatggttgtcatttgcttgaatacccccttgaaaaatgttgattcttgagcatcagtgggacatagaggtgtctgaagaaccattttacatgatttcataaataggaggtctctgcattaccatgtttgcttgcaaagtggaaaccttttagatgtgtaacttgaatatgtatcaagatctcaagtgcttaatgataaggtgttgacttgttaaattaaaccatttggaatmcattgtgtgtttgtagtagtcatttactagatctgttttcagatttttgcaaattgacattaaagtcactttagctataatatttcacttagcggatgggagaagtggcttttaatcttttgtctagccttagccaaaaatgttggttaaagtttattttcagaccatgggggctcaagttccaagtattgcccacccccaactttgaagaatttgcataccatcattcaytttcattgtgtagaaggtctcttcacagctgtactgaatcacagctttgtaggtggtcactccaggacctgtgatgtactccrctcggccactgggtagatmatcaggagggccacagtcaacaactaagaaagaagcatgggagggaggaatccattgatcatttcagtgctaactttccaaaggtytggagaagcacctttgggaggctgaggcrggcaaatcccttgagctcaggagtttgagaccagcctgggcaacatggcaagaccccctctctacgaaaggttaaaaagccgagcatggtggcacgtgcctgttgtcccaattacttgagaggctgaggtgggaggtaactaaatggctgaactgagggggagtcgtccatgtggaggaagaggtgtgctgcctttcctagagaaagggaatttgaaaccacccagagctccttagcaccctcatgtcaaatataagaaagatctgcggccgggcgcgatggctcatgcctgtaatcccggcactttgggaggccgaggcgggcagatcacaaggtcaggagatggagaccatcctggctaacacggtgaaaccccgtctctactaaaaatacaaaaaaaaaaaattagccaggcgtggtagcgggcgcctgtagtcccagctactcgggaggctgaggcaggagaatggcatgaacccgggaggcggagcttgcagagagccaagatggcaccacttcactccagcctgggtgacagagcaagactctgtcttaaaaaaaaaaaaaaaaaaaaaaaaaggctgcagcggaacagcacatgacatggcacaggttcaatgtaaaaggttgcaatttagaaggcagtaagggtagaaaaggacacgatagtaagattggaggagctgggctcggtggttcaaacctgtaatcagcattttgggaggccaaagtgggagggtcacttgagaccaggagttcaggaccagtctgggcaatagcgaaaccctctctacaaaaggtaaattggctgggcttggtggcgtggtctcagctactcaggaggctgaagcaggaggatggcttgagcctgggaggatgaggccgcagtgagctatgatcacaccactgcactaccgcctgggtgatagagactttgtctccaaaacaaaaaattcagcttattcttctgatccttttaataaattgaagtttttagaaagacctggaagtctttctaaagctcactgggcacggctcacacgtgtaatcccagcactcaagagaggccagggcagcctgggcaacatagtgagaccccatctctaccaaaaatttaaaaggagctgggtatgtggcacgtgcctgtagtccaagctactgaggaggctgagacaggaggatcacttgagcccgggagtttgagggtgtgtcacatgaggtatggttgatcattatcccagtttggggtgtgtgtattaccacataaaattgccccccttttctacatacaatagtgtatacttgctcacacatgtgaattgtgtgtaattggagggacacacaccaaaacggtaacgattaggccgggcctggtggctcacacctgtaattgcagcactttgggaggccaaggtgggtggatcacttgagattaggagttggagacaagcctgggcaacatggtgaaaccctgcctctactaaaactaaaaaaattactgggtgtggtggcgggcgcctgtaatcccggctactggggaagctgaagcaggagaattgcttgaacccaggaggcagaggtttcagtgagtcgagattgtgccactgcactccagcctgggcgacagaatgagaccccgtcaaaaaaaaaaaaaaaagtggctggtcacggtggctcacgcctgtaatcccaacactttgggaggccaaggcaggtggatcacttgaagtcaggagttcaagaccagcctggccaacatggtgaaacctcgtctctactaaaaatagaaaaattagctgggcttggtgggaagtgcttgtaatcccagctatttgggaggctgaggcaggataattacttgaacccgggagaaggaggttgcagtgagccgagatggcgccactccactccagcctgggtgacagaacaagactccgtctcaaaaaataaataaatattaaaaagtaatgattatacttgcatatggtggtattacaggtattaagatgttcataattttctgtattttccatcttctaccatgaatattgttgctttcatacttagaaaaatattgtcggccgggcgcggtggctcatgcgtgtaatcccagcactttgggaagccaaggtgggtggatcccctgagggcgggagttcgagaccagcctgaccaacatggagaaaccccgtctctactaaaaatacaaaattagccgggcgtggtagcacatgcctgtaatcccagctactagggaggctgaggcaggagaatcgcttgaacctgggaggcagaggttgcggtgagccgagatcacgccattgtactccagcctgggcaacaagaacaaaactgcgtctccaaaaaaaaaaagaaaaagaaaaaaatattgtcaggctgggcgctgtggctcatgcctgtactactagcgctttgggaggccgaggcaggtgggttgcctgagctcaggagttcaagaccagcttgggcagcacggtgaaataccatctctactaaaatacaaaaacttagccaggtgtggcggtgtgtgcctgtagtctcagctactcaggaagctgaggcaggagaattgcttgaactcaggaggcagaggttgcagtgagccaagattgcaccaccgcactccagcctgggcaacagagtgagactccgtctccaaaaagaaaaaaaagaaaaaaatattgtcaaagaacacgctttggaagcctgaggcgggcagatcacttgacgtcaggagtttgagaccagcctggccaacatggtgaaacctcgtctttaccaaaaaaatacaaaaattagccgtgcgtggtggcatgtgcctgtaatcctagctactcaggaggctgagacatgagaatctcttgaacccgggaggcagaggttgcagtgagccgagattgtcaccgcactccagcctgggtgacagagtgagactccgacacacacacacacacacacacacacacacacacwctctctctctctctctcacacactttgggaggcccaggtgggcagatcacctgaggtcaggagttcgagatcagcctggccaacatggtgaaaccccatctctactaaaaatacaaaaattagccgggtgtagtgacatgtgctggtagtgcctcccagctcctgggggtagctgacrtgggagaatcgcttgaacccaggagacagaggttgcagtgatctgagattgtaccactgtactccagcctgggcaacagaatgagacccttctcagaaaaaaaaaaaaaaaaaaaccttgtcaaagaacatatttttctaaagcacataccttccctagtaggttggttctgttttaacctctaagaatgcactgagagatgagtaaaaagaagcaaatttgaaattcaagggctgataaatggatcattaaaaaaaaaaaaccaaggatccgggcacagtggctcacgcctgtaatcttagcactttgggaggctgagaccggtggatcacttgaggtcaggagttcgagaccagcctgggcaacatggcaaaactctgtctctacaaataatacaaaaattagccaggcgtggtgtcaggtgcctgtggtcccagctactcaggaggctgaggcaggaagattgcttaagcctggaaagatagaaattgcagtgagccgagatcacaccgctgcactccagtctgggcaacagagcaagaccctgtctcagaaaaaaaaaaaaaaagggaaagaaaaaagaaagtaaacagaaaaccagagaagcaatagaagcagcaacagtagcagcagagggagttccgggcggttatggggcctgtagtcaccacacgaccgtactgctgcacgcgggcattggccggwcccaagatccatctttctgacaaactgcagtaaaggatttcaggggcaagtgaccctaaagaagaattcagaatatattaatttccttgtttatatcataaaatcactccccaaagmtgtgctctcacagyagttcctattctagtgttttacgaggtgctcctgaagggggtggcagcacacatgactagtatctgcgtgtgctggggttggggggatgcctggcacatggacgcactgccccaccgcctcggtgcacgtctatgccacctaggttacgtatttcatcactcaacaggtattggcattttatgaatcagatggaacctttgcagcaatttataattttttttttgcttttcaccctaatacaaaaacatatcagatctcagccaggtgcggtggctcatgcctgtaatcccgacactcctggagaccaaggcgggtggatcacttgaggtgaggagttcaagaccagcctggccagcatggtgaaaccctgtctctactaaaaawatacaaaaaattagcctggcatggtggcgtgcacctgtaatcccagctcctcaggaggttgaggcaggagaattgcttgaacctgtgaggcgggggttgcagtgagccgatattgcaacactgcactccagcctaggtgatagagtgagaccctgtctcaaatcatcatcatcatcatcatcatcatcatcatatctcaacatttctgcatctgatgttccaccatttctttatataaagtgacagaggaccaggcgcagtggttcacacctgtaatcccagcacattgggaggccgaggtgggaggattgcttgagctcagaagttcaagaccagcctgggcaacatagtgagacccccacctctacaaaaaagacaaaagttagccgggcgtgttggcgcttgcctgtagtcccagctacttgggaggctggggtgagaggattgcttgagcctgagaggtcaaggctgtggtgagctgtgatcgtgccactgcactccagcctgggtgacaaagtgagaccctgtccaaaaaaaaaaaaaaaaaagccagaggactgtggtgacaagtttgagaaagcaggtgtgatcagacttgcaagtgtgtctgtgtatctgtctagctggtggccattagctggaggagggctactaagagttcttttgtgagcttcgtctgtgtgctgtccatcagctttcaccgccagcgtcattcacagggaaacatttttcgacttgctaagataatgtttttctaaaatcaaacattaaaataaaagaagatggctttggcagaaaccctgtgccgcaaaggatttcaggtcttcttgtgttaagtcagaaactaaagaagtcgccgggcgcggtggctcacgcctgtaatcccagcactttgggaggccgaggcgggtggatcatgaggtcaggagatcgagaccatcctggctaacaaggtgaaaccccgtctctactaaaaatacaaaaaattagccgggcgcggtggcgggcgcctgtagtcccagctactcgggaggctgaggcaggagaatggcgtgaacccgggaagcggagcttgcagtgagccgagattgcgccactgcagtccgcagtccggcctgggcgacagagcgagactccgtctcaaaaaaaaaaaaaaaaamaaaaaaaacaaaaaaaaaagaaactaaagaagtctgtggtccgaggagctgtggaaaagagcctgcacaagaagtttgcaaggtgggaaaagtgtctctctttttttttttttttttttgacccgccacaggactgtggattgcatacctagctatcgttccaatgttattactttttaccactgggattccatgacaattttgaagaacataaagaggacgtgttaatttcttacctgtgcccctaaagcaacacgctaagcattttttaaaattatactcctcccttaacagtgaccactatttataactttgcagaatatactctttcccggggctgtctacttttttgtgggcccaggagttgtttcatggaaaggtcatttgaccagggggagaactttaatttgatgcaagactgggcacatggaacaggatagcaaactcatctttctgtcattccagccacttcacaaagagctgctgtcgtgtgtgaccaacagaaaagttgcccgttttattttattttatatatttttttgagacagagtcttgctctgtcacccaggctggagtgcagtggtgtgatttcggctcrccgcaacctgcgcctcccaggctcaagtgattctcctgcctcagccacccgagtagctgggattacaggcgcccgccacctaataatttttgtatttttagtggagacggggctactacctcatctaatttttgtatttttagtggagacggggtttcaccacgttggccaggctggtcttgaactcctggcctcaagtgatctgcctgcctctgcctcccaaagtgctgggaatacaggtgtgagccaccgcgcctggccaagttgcccattttaatcaccagctttccaaactagctttaaaacaaagggctcgcttatgtaaatttaaagttaagtataaagaaagaaagaaaaaagggmrgrattcagaatcacattttccatagccatcctttttgtcctctgaaaacttatttcttggctttttatcatttaaagatagacaaaagaaatcatgctgacacacgattttctcactttcctttcacatatctgcagatagaaatatgtttacatttcaaagcaatcgtcattgatcgtggtgtactttgttttaactcacttgcagaagctcatagccagtctcgcaaaagatggagaagctgtctttcaggatgtatttggcttgcacaggtgaaacgtggccattaggtggcgccatcggataagggcaaggctgygctgcgcagaggaaaccaggcttgttggttttcatgtggtctacagcagccaagactgaatcgagccatctgaagttcttagtttataaagaatacttaacatgtaaagagagctcaccatacgtggggtagggttctttaaaaccaaaggcaagattaaactctcaggtgcttttgcaaattaaggtttcttgttttccctgggactgagcaaaaggtatgtgagaaagctgggttatgtgggaagatggtgcagtccccacaaatagaacatctgctccatgccaggaacttcagagccatggctcaaaaccaagagagagtgtaactccgaggaaaagagctcaggggaggctttgggacttgcatgggactggagctgtgtttaaatcctagctctccatttccccatggttatgtgtaacctctctgagtctcagtttcttcatctgcaagatggggggcggttgacgataatagttgccccagggctgttgtgaagatcaaatacaaagcacctaggctagttcttggcggagctgtaatcaaccctcacagcagccccataggacagctgttatggcatggggagaaaaaccggctgacagacttgaaactaaagatccaggctgatttggggagcctcaggcttcccctcatgagctgcattccactctggcccccaaaccctggcctccactcaccccaaggcttcagtgctccccagctgcccctaaaaacccactggtcagtttcggagtcctctcctccctccagcacctgctagcatccagtgatccctgccaagctgctggggcagctgggtgcacctgggtgcccctgacccagcctgtggcctggggaagctctcagtcccatgcaggtcccaaagtctccccttgaggaatcaatctccagggacagccttggtggacctgtggaggcccagggcttctagcacttgagtgtctgtcacgacgaagaggtggtggaagttctggcagggcctcagagggcagagccagggccagtgggggtggtcctgagaggcagagtgtgtagatcctggctgcaaactgctgaagctgtggctctggtgcaacactccatggtcagaactcctttttcccctgccccaactcatacccacacttcaacttccacagctccacaccctgaagagtgaagcctctgggcttttgcacatactcttctgccacctagaactcttctgccacctagaactctgtccaacacccacttatcctttaaattcaatctcagcatttcctattcaaggatagcttcctagctcctagcccctgtctggtgaggtcctcctttggactctcacattgcccagtgcttggctctaggctgtgcttgccacagggctctggttatgtttctgtgactgttcccttactggactgagcagaggctgtgagaactgtggcttccacgttacatatccctagtagacatccataggatggaatgatgggtggatggaaggatggtggatggatggatggatggatggatggatggatggatggatggatggatagattggtggatagaaggactggtaggcagaaggatgggtgtatggatagatggctggctggatagaaagataagtaaggtagaagaatgggtggatggacagatgaatggctggaaggatggatgaaagaatgaatggatgaatggatggatgggtgggatctgtaggtagaaggatgggtggatggatagatggatggctggaaggatggatggatgatggatggatggatggatggatatatgggtggatatataggtggatgggtggatggatgaatggatgcatggatggatggaagaataggattggtaggtagaaggatgggtgggtggatagatggatagctggaaggatggatggatggatagatagaaggatgtgtgggtagaaggtcgggtggatggttggatgaatagaagaatggatagatagaaggatgggtggatgcaaggatgggtgggtgggtaggtaggtggatagaaggatggatggatggatggatggatggatggatggatagatggatggatagatggataggatgggtgggtgggtgaatggctgtaagaatgggcggatgggtaaatggatgggtgggtggatgaatgagggataggattggtaggcagaagaatgggtgggtgggtagatggacagttggaaggatggatggatacatagaaggatgtgtaggtagaaggatgggtggatggttggatgaatagaggaatggatggctagaaggatgggtggatggaaggatgggtaggtgggtgggtagatgtacagaaggatggatggatggggctgggcgcggtggctcacgcctgtaatcccagcacttcgggaggccaaggcggatggatcacgaggtcaagagatcaagaccattctgtccaacatggtgaaactctgcctctactaaaaatataaaaattagctgggcatggtggcgcatgcctgtaatctcagctattctagaggctgaggcaggagacttgcttgtatccaggaggcagaggttgcagtgagctgagattgtgccactgcactccagcctggcaacagagcaagtctttgtctaaaaaaaaaaaaaaaaaaacggatggatggatagggtgggtgggtgaatggctgaaagaatgggtagatggatgaatggatgggtgggtggatggatggataggattggtaggtagaataatgggtgaatggaaagagggatggctgaaaggatggatggatgggtatatggatggatggataggattggtaggtaaaataatgggtgggtggatagatggacagctggaaagatggatggatggatggatggatgtgtaggtagaagactgggtggatgggtagattaatagaagaatgggtgggtgggtggataaaggatggatggatggatagaaagatgggtaggtagaagaatgagtggacagatggatgactgggagaatgggtgggtggatggatggatggatggatgggtaggtaggtagaagaatgggtgcatggataggattggtaagtagaaggatgggtgggtagatagatagctggaaagatggatggatggatggatggatagatagaagaatgtgtaggcagaaggatgggtggatgggtagatgaatatgtggatgggtagatgaatataaggatgggtgggtggaaggatgggtgggtaggtggatggatagaaggatggatagatggatggatggatggatggatggatggaaggatgtgttggtagaaggaagggtagatgggtagatgaattggatggatggatggaagcatgtgttggtagaaggaagggtagatgggtagatgaataggatgggtggatagaaggatgagtggatggaaggatggatgggtgagtagatggatagaaggatggatggatggataaatggaaggatgggtaggtagaaggatgatggatggatagataggtgtctggaagaattggcagatggatggatggatggatggatggatgagtggatggatggatggatggatggatggatggattggtaggtagaaggatgggtgggtgcatagatggacagctggaaggatgggtggatgggtggatagatagaaggatgtgtagatagacaaatgggtggatggacagatgaatagaaggatgagtagacagaagaataagtgggtgggtgggtggatggatggtggatggatggatggatggatggatggatggatggatggaatgatgggtaggtagaaggatgagtgaatggatagatggatggctggaagtatgggtgagtggatggatgggtgaatggatggatggatggatgggtgaagaatgggtgggtgggtggatggatggaagaatgggtggatggatggatggatggatagaagtatgtgtaggtagaaggatgggtggatgggtagatgagtagaaggatgggttgatagaaggatgggtgggtggaaggatgggtggatgggtggttggatagaaggatggatggatggatggaaggatgggtaggtagaagtataagtggatggataggtggaagaatgggtggatggatgaatggatggatgggtgcatggatggataagtaggtagaacaatgggtggttggatagatggatggctggcaggatgagtggatgggtggatggataagattggtaggtagaaggatgggtgggtggctatatggatagctggaaggaatggatggatgcatggatacatggatggaaggatggatggatggatggacagacaggacgatgggtgtatggatggatggatagaaggatatgtagaaggatgggtggatagaaggatgagtgggtagaaggatgggtggatgggtggatgaatagaagaatgggtgggtagaaggataggtgaatgaatagatggatagctggaaggatgaatggactgatgatagaagaatggatagttagaaggatgagtgaatggatagatggattggatggatggatggatggatggatggatggatggatggatggatgaacggacgaaggatgggtggtagaaggatggctgaatagaaggatggatggataggatgggtaggtagaagaatgggtggatggttgtgtggacaaaaggatggatgggtgggtggattgatgaatggttggaaggatgaggggacagaaggatgagtggacagaaggatgggtgggtaaaaggatgagtggatgggtgaatgggtggttggaagaatgagtggtggaaggatggctgggtggctggctggagggagggacagcgggtgcttccccttagaagactgctgcctcagacctcagacaccactaaacctggtgtcccttcctagtcctggcccagaaggagccctacactctacagctccttgacactccaggagagagggcagctctgcgcttccagccaagatctgagacccacttgctcacctgtgctygtgtagtggatcttccagcctgtgtggtctcctgattcatctgtgacaaaggtgatggtcaccgtgttgctttttgtttcaatcctgtggggcaatgtcttcccacagaatgggccatgttcttctctgtctgtttgaatctgagaaagaagctcatgaaagctggggagcagctgcctgggtctggcctgggccggagggaagtaacccacctcctcagcatttcagggacagccaatgaggccaacccaggccatggattggggtgcccctccccactctgcctcccacacttgtactcgaaggccccagccttggacctccatagagcacctgaagaggtgggggtcaccgagggtgacgggaacgtggtgggggccatgctgcaggaagtagggggtgcagctgggctragggggaggatctgggacaagatgaggggcccaggagccagaccttgagaaagtcrtagggacacagggtttcagggtgtgtctccacatcgaaggactccacaaagtccagaatgacactgaacccctcctccaggctgatgctgtaagtgcaactggagagtttgggatacggccgtgggtattcagggctgctgagctccccagacctctgggtgaagacctggccggagcacagggctggaaggagggaaggcaggggagtgacttggcgtgccctctatcagccctcgcaccaacagcagggtggatgccttggggagcaggaaactgggacagggatgtggctgggacatctgcatccctgggttgggctgggccctgcaggtggccagcccctgaggcctacccagaaaccaaacgacccacccgatggctgaggggccgcttagagagggggtttctcttgctttgaggctttagctgaaacaggcagcactcgggatggagcgcacaggccctcactcacacccccagggagcgtggtggtgtcytgagccagagtcgcaaccccagggtaggggctagagcactgagttccaccaggctctgccrgggcggggggcgggggtggatggacacacaggaaggaggaagaagggacactctccttggtccctgggaattcgggaaaagagaggagcatctcctcgagcctaagggccccttcggagctcccctaaattcccttacagccaccccagtgattcccaagtttattcatcaggggtctcctacccgaacccagccaagaccagccagccccctgggttcctggaggaaccatccggaagaagggtctctcatcaccccctttccccaggtctgacccctgccctgggggctgctcctggaagttcaaggcaacagtgatcatgactgagtctggtgctctccttcctcgctggaacagctgatgctgctgccacgggcggggtgttgggctgggctctatccytcaaggaaggcttggtccccatcccataccaccaccccacccccagctgcagtggggggcatttgagttgtgaggcctctaggaagtgaggagccccaacattgcctgccttcttccacgtggctgtgccctatggggcagtgggaatcaccyctggatttgcgggggaccagattacccctcaatgaatatctcccagggtgtctcctctgtgggtcaggctcctccaggccagaccctgaatgggggtggttcaagattactctgggctcagcctctggggacctggactcgagcgaggccttrcccctctccgggcctcagtgccccatcttcaaaacrgggggtgaggccaaggagcctgtggccccatggaggaggctcccacagacctggggttcatgaggctgtgaggagggtaggcagagaggagcgcaccccgccgcctcccgaccctcccaccccagagacacgyggcagcaggtggggtggggccaggtttattattgggtccatggtgggtgaatgggagttggggcacagccatctcagcccaacccggagctgaggccagcaggctggctctggcttctgacctgctgggcaggccggagctccaggggaggctagaggctctgctctggaagagagatcagagaggcaaggagagacaccgagagggagaaaccgagtcgggggaggcagggtcagcgccagcaggtggggctgcccacgycccagagcactggccygtcccacagtgcagggaaccagggaaccaggtcccaaggaacgagggctagatacccccgactctcccgtggctacatgaggggttcccagagcccaggtggaaccaggtacacagtgggatgttagaattagtctcagtcgctagggcagggtggcactgatgagcctggctgctgagaggggaagcagggctgagaaggggagctggaggcagcagggcctagaagcacccagtgtccagggcccaggccctccgcacccstgggcagagcagcaatggccctgaggagccccgggtatcccaggagagggtgcgttggggcccaggcagcctccctcacctgagcaggtgcgcttgttacggtgcaggacgtagcctgcgcggcaggagcagtagaaaccgcccaggtggttgtggyagyggtggtcgcaggtgggcgcctctcccggggccacctggcactcgtcaatgtctgggggagaggcagggccaggcaggccgtcaggagggaaagaggcgggatccagcctggactcctcccaggagatccatgacctcagagtggacctcagaggaggcctcgtcctgtctagggtgcgggactggtgccgggccaatcaccttacaggcctagggtcgctgcaagctcccagcagcgctgggagaaagatgcaaacatcacctctgttaaaccagtgggagtttcagtgtccggcccgaggtcacccagctaatgaggggagtcaatcaaacccagggggcggggctacagcgctgaacccttgcagcagcttcctaaggagcagagaaattgagccacttgccagaggtcacacagttggtctctgcagggactgggatctgaaatcaaacatcctggcagcgctcccgctggcagggccccactttgtcagctgtaaatggggccctcggcccctgcgtcgtttttgttttttgttttttgagacggagtctagctcygtcgcccaggctggagtgtagtggtgcaatctctgttcactgcagcctccacctcgcaggttcaagcaattctcctgcctcagcctccctagtagctgggattccaggtgcgcaccaccacgcccagctaatttttgtagttttagtggagatagagtttcaccgtgttgccctggctggccttgaactcctgacctcaaatgatcagccagcctcggcctcccaaagtgctggaattacaggcgtgagctgcygcgcccggccagtccctgcgtcacttgaggcgatgctgtcctcagatccctggctcagagttggcactcagcccatgtgaatggaggtcacggctgttttggtctttgcattgtggatgatgtcaggccagaggcctctcccctgccctgggaaaggtggggaaactgaaggcagggctgcctggcctaagacagagttacccccacagccagctgcgcagactgagatgttgcaggacccctcttggctcaccctcggctgcatagaaggcctcgaaccccgtgaacrgcttctcgttggagtagtcggagcggaaggtaatgtccaggctggagcccagcgagtagaaagtgtccttgccaggggccygctccgtgtctgtgctctcctgcccgcacagcrtggccagcaccttggcccccgagctcagctgtggggtcaggtgtcacagggagtgaaggcaagacccaggcctgatstccctcctggccaagcctggcccctgctcccaggtgtccctgaaccctggctactccttggggaccccccgaccctgagaaaccccagccctcccgtcctgacggcaccttgacgaagtcgtactcgcagaggtgggagagctccaggtcgaagtgggtgaagtagaggcgcaggcggtagccggggggtgcagtcagggtccagcgccgctcctggtcattggcatactcccctggaaagccgggggatgccaggcgcccgaacacaggttcaggccacttygggcccaagggggtggccaccgagccrcacagaaggcccaggagggtcagcagcctatgggcagggcaggggcggtgagggcccaggcctgtgctcccaccccacaccctgcagggaggctgtgggcgcccacctacctcatggtgtgyccgtccagctggcctggcctggtctgcagccctacgctggtctcacctttgatctgtttgtccagtgacctgcccctgcccccagcctccctgactctgggattctgggaatcgactccatgactccagcctgctcagagttccaggcaggcaggacaggctgctctkggagccaggagtcggacctaggtaacaacagcctggaaacaaatcctggctctgcccctcacccctcccttttttttggatcttgttctgttgccccggcttcagtgcagtgctgcaatcatagctcactgcagcctctacttcctgtgttcaagcaatcctcccacctyagcctcccaagtagctgggattacaggcgagcaccaccacacctggctaattttttatttttggtagggatggggtttctccatgttggtcaggctggtcttgaactcctgccctcaggtgatccacctgccttagcctcccaaagtgctgggattacaggtgtgagccaccgtgcccagcctcaggctggctaatttyttaaaccctgtcagaaggacctggtgccaccaattcccgattcccttgcaggcttagaagtcgcttttggctgggctcggtggcttatacctgtaatcccagcactttgggaggccaaggtgggtggatcacgaggttgggagtttgagaccagcctgaccaacatggtgaaatcccatctctactaaaaatacaaaaatcatccaggtgtggcagcgcgcacttataatcccagctactcgggaggctgaggcaggagaattgcttgagcctgggaggcggaggttgcagtgatccgagatcgcaccactgcactccagcctggacgacagagtgagactccacctcaaaaaaaaaaaaaaaaaaaaagaagttgctttccaggcagttatttcacacctgtttatctgttcttccagcttccagaactttgaggctgctgcttcctcttccacactctgtcctcatggattcatgtcttgtcttttttttttttttatcccctttatatttgtttttgttttttgtagagatgggggtctccctgtgttgcccaggctggtcttgaactcctgagccaaagcgatgcacctgcctcagcctcgcaaagtgctgggattacaggtgtgagccaccaaacctctgcctccggggttcgagcaattctcctgcctcagcctcccgagtagctgggattacaggcatgcgccaccacgtccggctagttttgtatttttagtagagacggagtttctccatgttggtcaggctggtctcgaactcccaaccacaggtgatccacccgcctcagcctcccaaagtgctgggattacaggcgtgagccaccatgcctggcctattttcttttagagaccgggactctggctgggtgtagtgactcctgcccataatcccaggaggctgggaggctgaggcaggtgggtcgcctgagaccgggagttcaagaccagcttgggcaacatagcaagaccttgtctctaaaaaaaaaaaaaatttttttaaattagccaggcatggtggcatgcacctttagtcccagctacttggcaggctgagatgggacaatcgcttgagcccaggaggtctcaaggttgcagtgagccatgttcatgccattgaactccagcctgggtgacagagtaagattttgtctcaaaaaatacatacatagcaataataataatgcaagaaaatttcccagaactgaagaacgtgatactgatcgaaagtgtgccccaagtgcccagaaaaggagataaaaatattaatacagctttacacatatttaaaaacactggagagaataattatgttttacaaacaaagagaaagagaaaaatcaaatagtaaatcacatgcaaaagatcaggaaaaagaattattttggagttaaacctcatctctactaaaaatacaaaacttagctgggcatggtgttgcgtgcctgtaatcccagctacctggaaggctgaggcaggagaatcgcttgaacctggaggctgcaatgagccaagattgtgctactgcactccagcctgggacacagcgagactccatctcaaaaaaaaaaaaaaaaaaaaaaaaaaatagacggagtctcgctctgtcccaggctggagggcagtggtacgatctcagctcattgcagcatccacctcctggattcaagcgattctgctgcctcagcctcccaggtagctaggattagaggcatgtgtcaacacgccaggctaatttttgtatttttagtagagacagggtttcaccatgttggccaggctggtctcgaactcctgaccttgtgatccgccagcctcagcctcctaaagtgctgggattacaggcgtgagccaccatgtccagccgagactccatcttaaaaaaaaaaagaaaagaaaaagaaagaaagaaactacacctgtcttgtgactgctcattaatcttgccaaggtggaggccgggcacggtggctcacacctgtaatccctgcactttgggaggctgaggtgggtggatcacgaggtcaggagattgagaccatcctggctaacacggtgaaagcccgtctctactaaaaatacaaaattagccgggtgtggtggtgggcacctgtagtcccagctacttgggaggctgaggcaggagaatggcgtgaacccgggaggcggagcttgcagtgagccaagctcgygccactgcactccagcctgggtgacagagcaagactccgtctcaaaaaaaaaaatcttaccaaggtggtggttcagcccccgaacagggaagagagtagttttagggagaactattattattcttgtttcaagttaaactctaaattcctccgccggtcagctgggcctacacccaggaatgagcagggtcagsttggaggtcaggagcaggatggggtcggttatgtcataattttgcaagggtggtttcaataggaagacataaggtccaagagatgccattcactaagggactccattgggggcggtgagaaggctctggacagcttctccagaaaggggacgatgacagaacacctgttgagtccaaggagcattagagaattggtgaaaaatttggggccaaattagtgataaatttattgaaaactaagtaaatgagaaacaaacaaaaaaagaacctccagggaaaacaagaagctgtgtaggagataaaatgttatcataaggccagatgcggtggctcacacctggaatcccagcactttggtggtttgttttttttttttttttttgagatggagttttgctcgttgcccaggctggagtgcaatagcgcgatctcggctcactgcaacctccgcctcctgggttccagtgattctcctgcctcagcctccctagtagctgggattacaggcatgcaccaccacacccggctaattttgtatttttagtagagatggggtttctccatttggtcaggctggtcttgaactcttgacactgggcccagccttaatcccagcactttgggagcccgaggcgggtggatcacttgaggtcaggggtttgagaccagcatggacgtgcctgtaagcccagctactccgcctcccaagttcaagcaattctcttgcctcagcctccccagtagctgggcttacaggtgcccgccaccacacccggctaatgtttgtacttttagcagagaccacgtttcaccatgttggtcaggctggtcttgaactcctgacctcaggtgatccgcccgcctcggcctcccaaagtgctgggattacaggcatgagccacagtgccctaactcaagcaattcttaaacaaaagcctggtcaggcgcggtgctacctgactgtcagttacatggaggcgggccagagtgcagcctgatcaatgctaaattataactctatttctgtccagaattattcttttattttttcttttgctttttccttttattttctttaactggtttttttcttttttttcctttttttttttaagacagagtcttgctctgtcacccaggctggagcgcagtggcgcgatctcggctcactgtaactgtaaccgcccaaggggttcaccttgccagctgtctagacagagctgattcatcaagacaggggaattgcaatagagaaagagtaattcacgcagagctggctgtgcgggagaccagaattttactattactcaaatcagtctccccgaacattcggggagtagagtttttaaggataacctggtgggtagggggaagccagtgagccaggagtgctgactggtcagagatgaaatcacaggcagtcggagtcagagctgttttcttgcactgagtcctgggtgggggtcacaagatcagatgagcccgtttatccatctgggtggtgccggctgatccatcaaggcaggatctgcaaaatatctcaagcactgatcttaggagcagtttagggagggtgggaatctcgtagcctccagctgcatgactctaaaccataatttctaatcttgtggctaatgttaatcctacaaagacagtctagtccccaggcaagaacatctgctttgagaaagggctgtgaccgtctttgtttaaactataaactaaatttctcccaacgttagttcagcctacgcccaggaatraaggacagcttggaggctagaagcaagatggagttggctaagttaggtctctttcactgtctcagtcataatttggcaaaggcagtttcacaacttccgcttcctgggtttaagtgattcccctgcctcagccttccgagtagctggggttatagacgtgcgccaccacaccaggataatgcttgtgtttttagtagagacgaggttttgccatgttgccctcccaacactcctggcctcaagtgatctgcgcacctcggcctcccaatgtgctgggattacaggcatgagccaccacccggggctgcgctcattgttcatgaatttgtacagcttcatctccagagccctcctgatcctttcctggcagtcattgggtggggtgaaagtcccaacccttcagtctttaggtcttacttaccagccccaccctgaggctcccccggggctctaccctagaccactgcattagcataaactcgggagttctctaacagagcatataatgaacgacaagacacgcctaccgatcaggaatttccaaaggtgttagcggctccgtgacaggaactggggacaaacaccaaatcgatttcttcttctactacagaagataaaccccaaataatcagctccaagagggaaaggggctgcgggaggaggactgtgatttttcttctgacaagccgcacggacccatgaatccttaagccaggggcctggctaattatcataaatcaaattttgaaaagtctagataggattgatgttattccccatgccacactgggcctgtttgtggcccaaagatttctgggacgctgggggacccaggttgtgtcctcatcaaggctgyttctgtttcagcagatcatcctgggctgcatcgcacccacccagtcgtggggctcaggcttgcccccatccctggtgcatgcctcttcgcggcggccaggtgtgtgtatagactataggctggggaggcgcaggatctacgctgccggcaacttcatcttcctgcagctgcttcccagatctcctgcctcccagatggccccggctgtttccacaacctggtccaccctcccttctctcgggccggcactggttgagggctgcgtcgcacgtgcttctcaccaaagcttcctaacagggacggtgtgctccccctctgacatcggggtaaccggcagagggcctgcgtggctgcaggtcacagagctgagggaggcagagttgagattgagatctggaccgattccagagcccttggggaaaggccctcacacttagggggtcacgggatcgtccctctaagggggcagcattccctgcctggatcttggccagggagtagatgtcagagagaccatccatgccgggacctccagagtgcctggcctgagatgcaggagaccctggggtgagcagggtggagtggcgtcggacggtggctgctgattggctgtgtgtccttaggcacatcgccttgcctctgtgcagcaggaacaatgcctggcgggcaggtggttgtgaaggttaaatgaaagtgcctggcccacccagctgcagcctggcctgtcaggctccagaaatagcccctgccaacccacctgaacgccagctgctcctctcgggccttccctgagactatgaaggcccgggggcagacgccagctccccagactgatttgaaaggtcagggtggcctggagaagttagcctgaggtcagatctgctgatgggccaaaggtctgaaggtgctcagtctggtgaattcacaggggtggggagtggggggcaggtggagactggagggctatgactggcctgaagccagagttgatggcgaaactgaatcccccttactctggtgtcccagaaaacatacccgggtgagttagggctccaaggtggctgcctcggctgggagtggggcctccctccctgatgcgtccgctagcccagcccctgcccagggtggggaaaggggttggcaactcaggcccatgcaaagagggttcctttcctgtcctcccaccaccgttgggtcctggaaggcgggagttcagcaccttggagaggggacagccctggtcctcgcagtccctggtggggtgcccacacttgctttctcaatttgtccacatagggggcggggcatggtgggaatttgaacccaagtctgaatgccgggtggagtcagggcacagtcactgggccagtgttaagctcctgatgtgcttaaaaaggccgaaggtaaccagccccgccaccccttcctgtatttgccctggagtacctggatgggacctgacttacacctgtgagtgtccccaatttttctgagaatgctccsgggcagccccaccctgatctcacccaccccactgccctggggggctgtcaccagtggccttgtgaagggcttggtaaaaggacagctaagtcagcttcccaggacagctctgggtcccacgtgacgactgcggtgaccctctgtgccccaggctatccacgatggcccgcctgcagcctcagccctgcagcagacacttgggggtcagccagcaaggcctctgcagaccctcaccccagaggcacccaatggtgaatgtggccctgcctgggcccagccaaggtcaggagacacaggactccaatctttgctataaatacacgtgtttggtgagtgaggggcaacagaaggcagagagatggcgctgtacacagctggtataggcttggaggtggaacgccagagagacagacacacagacagtccgcccagcagggcaggccgggcagcattctggggcttgtaacacttggttggtgggcgagagccagcaggaggtccggcccggggctggaggggccgaggcaccccgcaggctccaaggtccgaggtcctgggtggcatcagtggtggcgcctgggctcagctcacatcattcagkgcctggagggacatgaggccagtcaggagggcgctctgggtccctgggtcccaccacccagccccgcaggccacccaccttgcgggcaaactcgggcagcacaaaggcggcgcggtgcacgtcggagttgtagtacttcagctgcatctgcgccacctgctgctgtgtcagcggctgcaccggctcctggaagttcgtgctctggggaccgggccaggggcacatcagggggggcacttttttttttttttttttgagacggagtctcactgttgccacgctggagtgcagtggcgtcatctcagctcactgcaacctctgtctcccaggttcaagtgattctcctgcctcagcctcaggtacgcgccaccacgcccggctaattttttttttttttgtattttgagtagtgatggggtttctccatgttggtcaggctggtcttgtactcctgacctcaagtgatccgcccaccttggtctcccaaaatgctggaattacaggcatgagacaccgcacctggcctggggagggtttttttttttttttgagtcggaatcttcctctgttacccaggctggaatgtagtggcgcaatctcggctcactgcaagctccgcctcccgggttcacgccattctcctgcctcagcctccccagcagctgggactacaggcgcgcgctgccatgcctggctaatttttttgtatttttagtagagacggggtttcaccgtgttagccaagatggtctcgatctcctgaccttgtgatctgcccgcctcagcctcccaaagtgctgggattacaggtgtgagccaccgcgcccggcaggggcagggatctctatttatgcccaccttccccccaacccccacccccagacacccccatctcaccgggttcttgctgcacagcatgaagccgatctggccgctggggtaggtggggatggtgcagtaggcataggccaccacggggaacagggactggcagaactgccgcatctccttgatgaggtccaggtgcagccactggcactcgcctgggggcccctaagcatcagcatccggcagggcctgccctgccccaccccgccccgccccagtgctcyaggcctgtggctcaccctggcagcagaggacaccatcttccttgagggctgtcttcatgagctggtaataggactccttgaagagactttcggcggggcctggggaagacagagggagacacactgaacagtctggctgtgacctccagggccactgtcacccacacagctaccaggtggccagagccaggatctgaacccaggtctgtgggggatccacacctgaatcccattcttgggggagtctcattggcaccacagcagaggaacctctaacctaggccttcgttcaagactagaacctgcccccactccagtgctgaccacttcagagcagaggggaggctgaagaggacacagggtcctcagtgtcccaatgccagatccccactctccttggtcaccagcttgtgaatctgggcagtcgcytggctcctgcctactgtcctgagccatgtttcagagggcaggtaacaaatgagaagggaaaagtacagctctagttcggggggtgggaggccgctctatcctttactctgaaggcctgggggaggctgacctccagacctgcagctgccagaaaaccctggggcccatccactgcttacccatggggtctgaggagtcagtgatgatcacgtcgaaggcatcctgattctgtttcatgaactcaaaaccgtcacccacatgtagggtcascttcgagctagagtagccaatggccatgcctggcaggaacttcttggagacttggatgacatcctggaggggatgggagggaccagtctgggccaaggggctgggggacctggagccagcacagccacgtgggactctccaagtgcctcacaggcaagccgccttggccaaccccttcccttttttttattatttttttttgagacagggtctcactttgtggcccaggctggagtgcagtggcatcgatcatggctcactacaccctcggcctccggggctcaggtgatcctcccccatcagcctcctgagtagctgggacaagtgtgttcaatcatacttggctactttttaaatttttggtagagatagagtctccctatgttgcctcgaactcctcgatcctcccacctcggcctccaaaagtgctaggattacagctgtgagccaccacacctggccccttttgggaacctcagtttataatgtgtaaagcggggagaactctggtacctccatttctccttgagagctggctcctgccggcggcttgggctcctctctcccatccctaccccctccttccagaccaaatcgccccatctgagtggctttcttgtcgcttcctattttatttatttttcgagacagtcttgctctgctgcccaggctggagtgcagtggcacgatctcagctcactgcaccctcctgcctcagcctcccgagtagttgggattacaggcgcacgccaccaagctgggccatttttttttttttttttttwtttttagtagagaccttgtgatctgcccgcctcagcctcccagagtgctgagattacaggtgtgagccaccagcgcttggcctgtttcctattttagaaggatgcaattccaacctctggccaggagaacctccccctccctgcacacggccacctgcttttcactgaggtctcagctcaaacgccacctcctggaggcctgccctgaccaccccccatgcattcacaggaaccctgccttctcctgtcccccagcccctgtcttgccttcatcagaccatcctttgatgtctctatttttgttgtttgttttttttgagacagattcttcctctgtcacccaggctggagtgcagtggcgagatctcggttcattgcaacttccgcctcccgggctcaagtaattcttccacctcagcctccctagtagctgggtttacagacatgcactaccatgcccggctaatttttgtatttttagtagaaatggggtttcaccaggttggccaggctgctcttgaactcctgacctcaggtgatctgcccgccttggcgtcccaaagtgctgggattacaggtgtgagccaccacgtctggccatctgatgtctcctttaactacgacatcagctcctagagggcagggactgatctgtcgtctaccactgtccccatacccgggcaacacctggcacgtagcatgattttagtgagcagctactgagtgtaaggggtaacgtacaaatagttgagctgtcttggggccctgcctggggctcagattaaaaatcagcttagtcggctgggcgtggtggctcacgcctgtaatcccagtactttgggaggacgaggctggcggatcacctgtggtcgccaggtccgagaccagcctgaccaacatggagaaaccctgtctctactaaaaatacaaaattagccgggcatggtagcgcatgtctgtaatcccagctactccggaggctgaggcagaagaactacttgagcccaggaggtggaggttgcagtgagccgagatcgcaccatcacactccagcctgggcaacaagagsgaaactctgtctcaaaaaaaaaaaaaaaaaaaaaatcagctcagttttagtaagagctcgccacgcaggtgccctcaccacctgccaggccctctgccatctggttttcctactgaaccctccccgaccaggtgttttccagatggagaaacaggccctacctgccttgctcgggggtgtgcagccatttcagggcacagctggccgctgggagaaccaggactcaaacctggctctacgccggcactcacctcgtcgatctcacactggaccacggactccacggaggggtgcttcaccacctcccgcaggacacctccatctccgcccccgatgatcagcacctgggaggagggggcagtcaaggcaggggccctggcaggactgggagcccccaggcccctgaagcagaccccctgacccctcggacccacgggcctcatctttttctaccctcggaaacgctttcgtgccggtgtcccctttcctggaagttccttccagggctgccctaggattccgaggccgcrtcagtgtcggcccccacccctccgcgggacgcccctggcctygctagcactttctctgacaaccatgcaggcagcatctgggaagagcccggagcacacctggggccgcccctcgtccggcactgttccaggggacactggggtacctttcgcgggttggggtggctgcagagaggcaggttggcgatcatctcctggtaggagaactcgtctctctccgtgcactggatgacaccgtccaacaccagcacgttgccataggtcttactgcgggcggagtgacagtcggggacctgggttctctggggtggggaaaacgtaccccaagccgccctgggtgaggagggtctccccatcccgcctaggggtcccagggatgaggagcgatggtgacacgtggcgaggaacggcaggcgggccgccgggtggaggccggggtgggacccggggtctcctckggctctgacgtgtcctgagggctgacacgtggagcggggcgcagactccgactcccccacccaagaggccagcccgcagtcccagccccagcccagggaggcggtgtgaggggtggcgagggggccagggcaggacgaggtccagcccgcttgggtcccggcgtggagaggcccgtgaggcgggcagcaggcggcccgggctgagcctagggggcaggcgcctgcgggcagcggcggtacctgcggaagacgaggatgtcctggtagcgcgagcgccggtggtggagcagctgctccacctgcagcgacagggcctggccgggccacaggctgcaggtctcgcggaaccagccctcgcggatggcggcggggccggaggcggcggggccgtcggggccgggctccatggcgggcgggcgggcggcgcggggcgcgggcccgggactgcaggccgcgcggcgccgcagcacaacgggaccagctccgcccgccgcccgcgccgcaacctaacccgggcgcggggcggggcctgccggcgggggcggagcccgcgctcgccaatggcaaagcggcctcgcctggcgctcattggccaccggctcgcagagcggcgcagagtggctgtggcgcgccgtccgtcggcggcagcagggtagtgcggcccgctccaggggccacgtggggcccggccggggccgggcggccgggtcgggttccggggcgggctgggccggcggaaggggtccgggtccttcctccgccccaagcagccggggcggtgcaccaccggcccccgcttccttctcggggttgggaggcaccgagggcctcgaggggctgcgggactcgggcttggtgtggagggcaagagcgctgcgacgtgcggactggagagtcagcctttgggctggagacacgggagcgggyggctacagtggtttacgttgttgcacggggcgagtagaacgtatccttctttgcgtccaaaatctggttccttgttggatttgaacagattatgtggctcgtcggggcgaaccgagggtttttatttacttggaaagaatcatcacagcccgcgaattmacaagctggatttagccattttcccttagattctgcgccatgagcctataggctgttgaatacgagagaagtgcttttctaaacgagtttctaaatttaccagcagtgtccaggaagaggcccagaacatacatattcagcaccagaaaagactggcacgcaatttttcttgacaaactgggtcttgctctttgaagggtgggtgggaatgtgctgtttttatgagaatgtcaaagaacttmtcagaatcacattaagcatgctaattaccaaatattaaatgctaattgttccacacgcagttcgaatgccaaggaaggaagatgaaactagtataagctactcttgacattatgtcagggatggttttgacacgttttgcagcctccacctggaggtggggaacgtttcctgtgtcgtccccagagcagagtaacagcgttgtttatgggtgagagcaagcctcaagcctaggcaacaatgtgccttgcttgcttttaagctccttctaaaggggaggtaaaccaagaccgctaaagaattgctaggtgcctgggcgtgatggttcaccccggtaatcccagcactgtgggaggcggaggcggaggcgggcggatcacgaggtcaagagatcaagacgatcctggccaacatggtgaaaccccgtctgtactaaaaatacaaaaattagctgggcatggtagtgcgcgcctgcagtcccagctactcgggaggctgaggcaggagaatcgcttgaacccgggagttggaggttgcagtgagctgagattgcgccactgcactctagcctgggcaacgatagtgaaactccgtctcaaaaaaaaaaaaaaaaaattgctaggcagctgggcacaggggctcaggctgataatactagaattttgggaggccgaggcaggaggaccgcttgagcccaggagttcgagaccagcctgggcaacatagcaagactgtctctaaaaaataaaaaacattgctaggcaacagcttccatggacttgttccaggaacgaagattattcttgaaatgtccacgtagtggataagacagagtcaatcagtgtgtccagtgctacaggcttgattgggttcaatcctgtacttgggtcaaggtgtttgcctacattgcctgtacttcctccaagacatttctgcctctgggttgtaactgcccgtgtacttgtctgtgttccctaagccagatcataagctctgaagctgaggatggtggctgtagatggcagtacttgtctgtgttccctgagccagatcataagctctgaagctgaggatggtggccgtagatgacaggcctggatgcagccaggtgccttgtggatcagcttgcttttaggtggtgaaggacygaccatagacagtggccctggcattccaggacactgcatgggggaaagtggagggccaggtccatcccatcccctctataagctggacaaagctgctccagcatgtgggtcctcacatgaaaaaggccacattgacatcctttgtcctcctgtagagggagtgaaactgagaggcctcagcctcaagcaggcacagaacttgagacctctcggccagagtgtacagacattgcacaaaccttccaagttcagagaagacaaaagccctgagtaaattacagacaaaaaagcccccaaatatacagcactgtgaatccagaaatgccacctgacttcaggtcacaaggaagaaaaactgattttgccagaagtagccattattgcacagcccagttataatcacaactgacgttaaagtcaggccagatgaccacagaagtctacagaaaaaaaccaggattggccacgcgtggtggctcacgcttgtaatcccagcagttcgggaggccaaagcgggtggatcacctgaggtcaggagttcaagaccagcctggccaaggtggtgaaattccatctctactaaaaatacaaaaactagctgccattgtggcgtgcacctgtaatcccagctacttgggaggctgaggcatgagaattgcttcaacccaggaggcggaggttgcagtgagccacagtcgcaccactgcactccagcctaggtgacagagcgagaccctgtctccaagaaaggaaaaaaaaaaaaacaaaaaaaaacacccccaacaccaaaaaacaaaacaaaacaaaacaaaaaaacaaccaaacaaccaggactgagaaaatcaggctttagcatgaaatgttttcccctaaattcagaccaatgtacctcaaaaacccagttgtaaagcttaagtgtctagtgggttaactatcccacccaacctcctaaaaagtgttattataaaaggaaaaaggggagaaagggtagaggagagaaaggtgggccaatggctactgttcaaggaaatggtttaaatggggctgccacgtggttatgtgtctgtcacgagaggcttgttaagcagttagcacttgagtcatttttctacacttccattcagccaggcagacagctgtggttatgagtgggaacaattttggccattatgtggtgtggcttggttgaaaatgcttatggcaagctgcctaaggcaccgcaaacagcagcatgcctccttgagcacacagtccttctgctcataaattctctctctacctccaacctggccagccctgccagatccctttcccttcctcttggagcacaggcccagccatggcctccactactcagtcactgcacagttcctgacccacacatacccctctatgtgctcaccatcctccttagtcctgtcccaggtgctccccaagtgacctgacattgagctccagctgttgttctttgaacacccaagaccctcatctccaccccatggctgaggagttctggatttggggtttgatggaccagtaaacctctgcagacaccatctagggactgacactgggttgcgaactttttattttgcaagattgaatatttgaaaacaactcaaactcctgtctaaggttcctgtcttttaaaaaacaaacagaaggccaggcacagtggctcacgcctgtaatcccagcactttgggaggccaaggtgggtggattacctgaggtcaggagttcaggaccagcctggccaacgtggtgaaactccatctctactaaaagtacaaaaattagccaggcgtggtggtgggcacctctaatcccagctacttgggaggctgaggcaggagaatttcttgaacccaggagatggagattgcagtgagcgaagatcatgccattgcactccagcctgaacgccagagggagactctgcctcaaaaaacaaacaaaccaacaaacaaacaaacagaaaaacattgtcacacagacaaaaccaatatggaaaacttccaaagaaagggtgcggcatcactttaacgggtgagcacagcggccctggcagcctccaggctctaggtggcactggattctttctgacaagtcctcatctgggctgtcagagacctccgctttgagctgcgctgccatagagctctctggaagtcccttgctcctcagggtccagtccgaatgcgcctttcacgaggcctctcaggccatcctcaggagaaaataatttctcactttggccaggcgtcgtggctcacgccttgcaatcccagcactttggaaggctgaggtgggcggatcacttgaggtcaggagttcaagaccagtctggccaacatggtacaaccccgtctccactaattagctgggtgtggtggtgggcgcctgtaatcccagctacgtgggaggctgaggcaggagaattgcttgaacccgagaggcagaggttgcagtgagctgagatcgtaccactgcactccagcctgggtgacaagagcgagactgtctcaaaaaaaaaaaaaaaaaaaaaattccacctgtgaggccgggcacagtggctcacgcctgtaatcccagcactttgggaggctgaggtgagtggatcacctgaggtcaggagttcgagaccagcctgaccaacatggtgaaaccttgtctgtacttaaaaatacaaaaataagccgggcgtgatggcaggcgcctgtaatcccaactccttgggaggctgaggcaggacaactgcttgaatccaggaggtggaggttgcagtgagccgagattgtgccgtgccattgcactycagcctgggcaacaagagcgaaactcttgtctcaggaaaaaaaaaaaaaaaaaattccrcttgtcaattttttatagcagagactgccatttttrggcagtgactgttctttgtccttcgatgtctgttcttcccaaattctatagtagaaccctgggcttttagytggacacacggatgactgaaataatgatatttcctagtaccccttgctgtggtcttgtgactaagttctgaccaatgggaagttgaaatgggcagtatcctattcaaagagattgggtgctgttctttcctccttccagcagactggaatgagaatgtaatggctggagcaagggcagtcaccctgcaccatgaggcggcagccttgtgtttgagctgaggatggtaaaacaagataggagcctgtgtctgatgatcatgagcatcacactagctctgggccaactatgtttacaaaagaggaggaaaatcatctctcttgttaaaagtcactatagtttggcttttctgtcattttcaaccagtctagtcctagctaaaacaaactccagcctatcttaggacagggctgttctctgctgttcaagagtgggagctctctgacggcagtgatgtgtgatttggcttggtaccccccaaaggttatcatatacagttggcaatctcaatactttgtgggatgaatttcaaagaaaaaaggtttctaggttaagtatttgtaaaaaccaaagtaatggcattttgtgctttcctgatttattagcccatctcaggattaaaataaaatgaagttctaaagaaattatcagagactgggtcacaaatttatataaaagttyagtsagtgctgcattattaagaatagtaccaaaaatgaaaacctaagcgtttaacaatgggggttggcgaaaataaattttagattgagaaaagtgtcataacacaaactttcaaggtgacaaatgatagaaacctraacccaagatatattttaaaaatatatctatatacacatagcgaaagcttataaggaaatacagcaaaatgttaatctcagctgggtgtggtggctcatgcctgaaatcccaacactggcaggacaagacaggaggattgcttgaggccaggagttcaagaccagcctgggcaacacagcaagaccccatctctataaaacataagaaaaattacccaggtgtggtggcatgtgcctgggaggtcaaggctgcagtgagctaggatcacactactgcactccagaatgggcaacagagtgagaccctgtctcaaaaaaaggaaaaaagcatctttgtgtgacaggactacaaatgattaaaattttctctttgcatttgcctttttttttgagacagagtcttgctctactgcccaggctcaaatgaggtggcgtgatctcggctcactgcaacctccgcctcctaggttcaagcgattctcctgcctcagcctcctgagtagctgggattacaggcgtccaccaccatgcccggctaattttttgtatttttagtagagaaaggctttcaccgtgttggccagcatggtctcgatctcctgacctcgtgatccgcctgcctcagcctcccaaagtgctgggattgcaggcgtgagccaccgcacccggccggctctggatttttctagaagtcaccataacmcccggagcacactcacctgcccacagacagctgaagatggttgcctgaacaggatggcaacctgccagagctgtggcggcaacaaaataaaagtcaggaatcagctttcttcaggaagaattttaatggtttaaaaatatgtatgtacaaaagcagcaccagcatttggtgcttccggtccacaggcgccacgtgtcttccaggactatctctgtggccagttgtacctgaagcctctgcagagagtacaaaaacaacagttatttcttccgggctggttggatgttctcagatggtttacaaaatggtgcaaatcttaatcatgcagaacagaggaagaatggtttgctcaggggccccagagaactcggyggcccaccagagttggctgagctgagcagcatcttgagaaggcagacctgtttttcctgccctcgggcaagtcccctgacctcagggtcggcttaattattaggattttatgtttttaacaaaaacatttggctgggtgcagtggctcacacctgtaatcccagtactctgggaggccaaggcgggaggatcaattgaggccaggagtttgagaccagcctggccaacatggcaaaaccccatctctactaaaaatacaaaaacaggccgggcgcggtggctcacgcctgtaaccccagcactgtgggaggccgaggcgggcggatcacaaggtcaggagatcgagaccatcctggctaacatggtgaaacccygtctctactaaaaaatacaaaaaattagccgggcatcatggcgggcgcctgtggtcccagctactcgagaggctgaggcaggagaatggcgtgaacccgggaggcgsagcttgcagtgagcagagatcgygccactgcactccagcctgggcgacagaccgagactccatctcaaagaagaaaaaaaaaaaaaaacmttakccgggcatgatggcaggcacctgtaatcccagctactcgggaggctgaggtgagagacttgcttgaacccaggaggtggaggttgcagtgagctgagattgtgccactgcactccagcctgggtgacagaatgagactctcacaaaacaaaaccaaaccaagccaaaccactcttcaacaacaaggataacccacatgtgcttactttttcctcattcctaataggctggtccaggaaaatttcacaamtatttacacctattttccctgaggtgaccccaggacacacggtaactagagagccaggaacaaggggaatctgagtcctggggtgcagtgcctggctctgtgatgtrtggcacagagcaaatcacctcccgcccttgttttccgagtggcgtgagggacctggctgtgggaggttctctgagtcatcctggttgaagacccctggacactcgctccccagctactccccacggaccrcaccacgcagggcaggtgctttctcactgggctccctgggccacaccgccgtccaccacatacctgtctgactttccagttggaaaggacatgcttttgtttcccaccgactgtttaatttttttggctgcaatgcatttctgaaaagaaaagaaaccgtttaagctgggtgggcaccttgaccacaagatacacagaaaaacacacctgagctcaggtggccaaagattctagcagcacaggagtgactttagatcccctgagagaggatgtttctgtgtctctgaaggcaaggccgccaggatgcgctgcaagaggaacaggagcrccccmaagcagccctgcccccgcgcctgtggaagctacagccacgctgtttccctggcaccagcaccaacacccacgaggggtgaatgcaggcttgtgctggccccaaagggggtgcttttggcctgcagctatagttcccatggtagcaaacacagaataataccctttaaagccacatgccagcttttacagcctcgttttatgagttgctggggtagctgatcagtactgtctgcccttgggaagaaatgaggtgaggaaaaagatatgcaaaggaatggactcctggatgggcctgtcttctcagcagaggaggaggtcaraaacaggcgccaccagcgtgctaaaatcctccaggagcagttcttaccttgccagacggggtctgtttatttggatcaaactgagaagaaactttggatttgctgtttcctgaaaggtaagagatgagagagacctgcggtcaggtcaatgagttaccacacatcacaggctcacagcgaggccgggaccatgacactcagggaagccttggctgtgagagcacccctgtcacgatgaggggctagggctcatggctcacataaatgaatacatagcgatcctggtccctgtgggcagtctgaaaaccaggcccatttctctcagctctagtcccaggaccttaggggcaggtggctacagcagtggcccccgcacataaggaaatccattctgatctctgtgctgggtgatgccataaggaactcgggctctgaggcgacactcctgtataaagggccattgtgtggactggcctctgctttctcttttccaaaggagcatgttgctccgaaggctgctagagtcgagaatgccatctgtagccccttcaaagcagacggactctcacagcccaagcagccataggggttcatgtcataggctktgagatttttcaacaaacaaaattcgtgttgtgtgtgtgtgtgtgtgwgwgaaagagagagagagagagagargtttatgggcacaagttatagtgaggaaggatggcgccctggtcacagtggaagtgacaggtgatcttgctaacccaccatggaggccaccatgagttgagctcccatggaggaggyggyaatgaggctgcaggcgactgtccacattgccacggcctctctggactactccaacaattcctggctagcaccatgccttgtgcaggactcacttggcccctatattgtggtctctttatggcttcctcccctctgacgcgcacagatgtccctgtatggggccccattacttcctcaccagcaaaagccttgaagtctgactggctgtagtcgtaaggcgtaaactctttttctggtggctctgggtcctttggcttcttggaaattttgagtcgtttcttctcttgtttctgttctgtggtccttgggtcgcttgttgctcgctctctcttctttgcagcattttctagctgtagatcaggaacagatgtgggggaggaacagggaggcacatgggaacagggaactccrccggcctcagcaatagctgggacccagctgcctaagtggtaagaagaacagtcagtggtggggagaggagctgtggctggaacttcgggaccaacactcagggtcagctgaaacaaattcctcactggacaatgacatgaggtcatttaagaaaggcaagcaggccaggtgcagtggctcatgcctataattccagtgctttgggcggcctaggtgggaggactgctttaggcagtctgagaccagcctgggcaacatagcaagaccmctatctctacaaaaaaaaagaaacaaatgtagctgggcatggtggtgcgtgcttgtagtcctagctacttgggaggctgaggtgggaggatcacttgaacccaggagtacaaggctgcaatgagctataattgcaccactgtactccagcctgggcatcagggtaagagtaagaccatgtcactattttttttttaaaaggaaattaaaaaaaaaaaaaaaaaaaaaaggaaaggcagggggcaggggttaagaattcgagtgatagcctgggcaatatagtgagaccccgtctccaccaaaarcaataacaaaaaatagctgggaatggtggtgtgtgcctgtggtctagctacttgggtggttgaggagggaggatcgtttgagcccaagagtttgaggctgtagtgagctgcaactgtgccactgcactccagcctgtgcaacagaggtagacactacttcaaaaaaaaaaaaaaaaagagttccagagtgctctggggtttcattctctagaatgcaacrtttttgtaggacacagcaggacacacaacaagcttcagcactgtaacctcaataccttttctactactacagttgagtggtctggcatatttaccataaacacagtggaagaaggttaagaggaattacaatatcaatcttgtggaggtttcggaaatgaggtagacactaatagccaagctaaggtgaaccggaaagaagtcaggacttaatataaagcacagggcaagccccctaagatatccaaggaagatcctgaccacaagcaggggcatcgtttttcaaaggaaaaaggagaaaagctggcacataccacgacctgctgtcggacggagatggcctgttctgctgcagctttgcacgcctcctttgcctgttcccgggcagctgcaagggagagaacttgtctctggagttggtgaatccagcaaccaccctcccctccatctccatccccctccgacttggcctagccacaggggttgtcacggctgattcctcctccctctcaggtccccggtcccccatctctgcaggacaggctgcctcagagctcaggctcaggtgctctgcccaccttcagctacacgtgagctgatcctccccagccctgcctgctcctcttctgtgaacctaaatgctcagtggyctgtggacctgagggcgtttaacaggatcgtcaccatcaccatcgtggacaaacctgctcaaaccagctactttggctgccagcaactccagctttccagctgctcaggacaaaaccttcatccaaggttcccttcccttytctcacatgccacatccacctcatcatcaaatgctgtcagctttgctatgggacagatcaaggctctgacagcttctcaccacctcctctgctcccacgctggtctcaaagccaccatcccctctcgcctgagccactgccatgtctcctatcccttcctggactcccatcctgtcctctatagtctactgttgacacagcagccagagtgccacatgtcagtcacttccccccctgtctgctcagcaccctcctggcttctgaactcagagtaaaaggcagcgtcatcccgtgggcctctgctggctccttccccatctcctgctcttctctacccgcctctgctcatgcaggcccacttgctgctgctcagcatgcccagtgaactagccccagggcctctgggctcgctgtgctgtggctccagaactcttctctaggtcactgcaggtctcgtcaatgtcgcattcattagactgccttctccaaccaccgagacagctacagcacctccagcactccccaccaatctctctgcacagcacctgctgccatctgccaggatagatactgattgcccaccatccctcagcagaagggaagccccacaggggcttcattcatcgccgtatctggcacttggctgaaacagcgggtgtgcaacagccattctttaacagccgactgagttgcaaggaagtgagtgttacctgtttgctcagctgccttcttcttgacagcttctttagagtctttttgtacttgtacctgggccagcttccarcggttgctgatctataatgaaagcaaatataacaaaaaaaaccctccaaagtcagccacctaagtctgtcttacttttcatgaggtgacgaagggcaggttaacctaagaagtacacacattctaagtcataaattttcaaatctaagggcatgaaaaataaatttcatgctggctttattgctaaaatccctattaaggacaaagtgctactgtcctccaggcactgggccatccatcatctcattcaatccctctgtaaccctgggaaaaaggtactgtcatcaccctctctttagagatgagcaaacagactccgggagastaaataacttgtccaagggrcatggtcagtaaatgacagaagcagactcaaggctgggcttccgcaagtctgctgtgtttctttatgacaccccackgacctatggcgttacaacacatggaggtgacactgggcataacacacaggacgtgcagttgttcagtgtgacataacccgtggggggaaaagaggagagaaggcagaagccccacctgattccccatttccaaaaatagcaagctaactcagggacaggaacrgggctgggggacctctcggttttgcctaacaaaagagctctgctgccacacagaggaagccagtcgcccatgtcatcagagcagacgcttcctaaagggaggaaggaggctgcgaacaacagttcacgttctggctctggggaacatctcaagagggtctaggsgaggtgtgctctcattcttactcataatgctggtaaaaacaagccagataagtaagatagagtgttttaaaattaaagctgtcacctttaagagccttaaagtaacagacatctataaaaatgcatcaagctgtatatttaatatttgtgtactttactacatatagattaaacctcaatttaaaaaccgcaaatgaagatttgtttcttacaaagtttccaagtgcttttctttttcttttttggctagagttcgctctgtcgcgcaggttggagtgcagtggcgcaacctcggctcactgcaagctccgccccccaggttcaagcgattctcctgcctcagccccccgagtagctgggactacaggcgcctgccacgacgcctggctaattttttgtatttttagtagagacggggtttcaccatgttagccaggatggtttcgatctcctgacctcatgatccgcccgcctcggcctctcaaagtgctgggattacaggcgtgagccaccatgcccagcccaagtgcttttaagaatctcactgaagttctggaccctttccctagaaacaatgctagaaaataaagggcttttgcattcattttcacgggattcacagatgagataggcttgtctaaaacagaaacctggtatgaataattaagaaatccccttttcttagaaagtctcttttagggccaggcgcagtagctcacgtctgtagtcccagcactttgggaggccaaggcgggtggatcacctgaggtcaggagttcgagaccagcctggtcaacatggtgaaaccccatctctacaaaaattagccgggcatgacagcaggtgcctgtaatcccagctacttgggaggctgaggcagaactgcttgaacctgggaggtggaggttgcagtgagtcaagattgtgcctctgcactccagcctgggtgacaaagcgagactccatctcaaaaaaaaaaaaaaaaaaaaaaragtctcttttagaacaggtgacaagtccacttacttcatagattttggttgatggatcgaacttcgctgcctgagagacgggagcacggtgtcccagtgagggcagaaactggaggaaggaaatggctgtgtgaaacgctgccgggaacggaatctagagccacggggcagaagcgctcagatggggggttgctggtgccktgtcagcgtctttgccaggacaccagggcagccgacacactggcttcagaggcttccttcccaggtaaaagcatgtacagctgtaggcatctctgcatatcctgtcagccctgacaaaactactactcaccatcctaaatggattttcaaaggactccatgatgttctgggcttttttctgtgcaactgtcaatggaccctttttactgtcttcagcactaggttcctgcagggacagacaaaaaacgatcactaatgaccatgatcatctgtgacatcaagatgcaagcaagagagcaacagttaacagtgattttttttttttttctggagacagagtctcgctcttttgcccaggctggagtacagtggtgtgatctctgctcactgcaacctccacctcctgtgttcaagcgattctcctgcctcagcctcctgagtagctgggattacaggcacgtgccaccatgcccagctaatttttgtatttttagcagagaccaggtttcaccatattggccaggctggtcttgaactcctgacctcaagtggtccacccgccttggcttcccaaagtgctgggattacaggtgtgagccaccgcacgcacccggccagtaacagtgatattaataccaatggctaaggctaatttttcatacactctcttatgtataaggtgttgtgtctgcaacagcacacagtagcatttcaatatcaatgtgctggatcagtgaattctcagcatgtcctcatagcctatgaggtggtattactctcaccatcttacagaggaggaaactgaggcctacagaggttgtgacagtctttcagaggcttgcagtgaatacaagcagaccaaggatctaaacccaccatggtctggctctagaacatgaggtcttaattgatgcctgaaatttattttatgtatgtatgtattatttttttgagtggagtcttgctctgttgcccaggttggagtgcagtggtgccatctctgctcactgcaacctccgcctcctggattcaagtgattctcctgcctcagcctcacgagtagctgggattacaagcgtgcgccacaatgcccggctaattaaagacagggtttcaccatgttggccaggctggtctcaaactcctgacctcaggtgatatgcccgccttgccctccaaaagtgctgggattacaggtgtgagccaccacgccaggcctgaaatttagtattacatatctttatagggaatcattgaaattatgcaacaaaatgctgcttccaactgggttcataaatatgtgctatccttttgcttcatctgtaattatgcgcccttgcaacacaagagtgcagggagaccacagcctcctttacaccaaacagcacttccgtatcaaagcagcccagagctcatgctaacacgcttagctgctaaatcatcttcatgactcaaattagctctgaggtcagctaaagcgcctagtattttctcattaattgctaaagcaaggcccaatctagatttatgtaattaagttaaaaaccaaagtgaagcctgggcgacatggtgaaaccccacctctacaaaacatacaaaaattggctgggcatggtggcatacacctgtagtcccagctactcgagagaaggctggggcagagggattgcttgagcccaggaggcagaggttgcagtgagccaggatggtgccactgcactcccacctgggtgacaggatgagatcctgtcacaaaaaaaaaaaaaaaaaaaaaaaaaaaaaatgccgggtgtggtggctcatgcctgtaatcccagcactttgggaggcttaggtgggtggatcgcctgaggtcaggcattcgagaccagcctggccaacatagtggccccatctctattaaaaatataaaatattagctaagtatggtggcgggcgcctgcaatcccagctactagggaagctgaggcaggagaatcgcttgaacctgggaggtggaggttgcagtgagccgagatgatgccactgcactccagcctgtgcaacaagagcgaaactccatctcaaaaaaccaaaccaaacaaacaaaaaaagtgaaatagctgggcacagtgactcatgcctgtaatcccagctactcaggaggctgaggcaggaggatcgtttgagcctcagaagtcaaggctgcagtgagccatgattgtgccactgcattccagccttggtggcagaacaagattgtctcaaaaaaaaaaaaaatcatttctcttcttcactgaaagcacacatatgtggtgctggggtcaggcaggaagctatgggcagcgcacattctacagttcatcggacagtacacccatgccacccctgctgggcatccaggtgaaccgtttttcctccaccaccactgcagcttgtctggaaagccctgcttgtatgttctcttagcgcaggccctcctcccactaggtgctgttcaacaacaggacgtcagcctttcctggaagatttcttcacacagagctcaagagaatcccccatccacgtccccagaccacctcctccagagtggtcagtgccaccttgctcattggtctctatgcctctcccagcactgctgggttttgctctcagcattagtctccgagtgtatgcaatgctccaggcagacagcctgctgaataaatccagtaaatcccagggggtcctcatcacctcagtgaagtttctgtgctactcacattaaataacgtgatgacagctgtggcaatcaggcatgtggtacccagcaagttatcttctttttcatcagggaagaggctcgcctgcttctgaactggcacagatcctagaggagcagaagatagtaaggtcaaagcctacagaattttgtttattttttctttttgagatggagttttagtgtagtcccctaggctggagtacaatggcacaatctcggctcactgcaacctccgcctcctcggttcaagtgattctcctgcctctgcctcctaagtagctaagattacaggtgcccaccaccatgccagctaatttttgtatttttagtagagatggggtttcaccatgttggccaggctggtctcaaactcctgacctcaggtgatctacccgcctcagccttccaatatgctggcattacaggcataagccaccacgcccggccaagcctacagaattttagacaaggtagctgtgtcccaacctcttcgggacagtcaggagggctctcgactttaccactggttgggatgattggatagccatccggaggggcatgggagcagtcgtgaggtccaaagagaacattctccaatctctgcattaaaagacaccagcaggctggcatgtaaaacgtgcaagccggcagtagctttctgccagctgtcagcacaggcctctgtcagaggtgtacttgcactggctgtgacttgacgttttccctcctgggggagaaaacagatccgacactctacctcagcactgggcagcggtccgctcttcttcactccggctgcaacttcagactaaggaaaaaaacgaagggaattgaggaaagttgcccaagcacctcaagtccaacccccagtctccagtgctgactgtattccttcaccagcctgtttctcaaaagcccagagattttctttcctctcttcactccttacagtgcctggcatgataattatttggtgctcaataattatttgtagaatgaaagaataaagctctttaacatgactaagcacaataggaaggattccaaagagcttgaaaaagactcttctctagtaatcaaggtctctctttacttggacaaagtacagagcttacaaagacatttttaacacaaaaattgcaaatgtggggctggcaggtggctcacaactgtaattccagtactttgggaggctgaggtgggaggactgcttgagcccacgggttcaagaccagtctgggaaacacagcaagacccatctctacaaaaaattaaaaaaaacatagctgggtatggtggtgtatgcctgtggtcccagctgctcaggaggctaaggtgggagcctagcagatgcgaggctacagtgagccatgattgcaccactgcactccagcctgggtgtcagagcaagaccctgtttctttttttttttgagacggagtctcgctctgtcgcccagactggagtgcagtggcgggatctcggctcactgcaagctccgcctcccgggttcacgccattctcctgcctcagcctcccaagtagctgggactacaggcgcccgccactacgcctggctaattttttgtatttttagtagagacggggtttcaccgttttagccgggatggtctcgatctcctgacctcgtgatccgcccgcctcggcctcccaaagtgctgggattacaggcgtgagccaccgcgcccggctgaccctgtttcaaaacaacaacaacaacaaaaaaaacaaaagaaaactggctgccattgtcagcatttgctacgaagtctcatcaatcttttcttctgatgcttcctacacctgttctttccttctcagtgtgtgattcctcactcattcagggagctatcacttcacatctgggccatcgccaggctcccaaaactagctccctctgctgaggtcaccgctccatctcactccaccacattaactgccttagaacagtgaattggcccagttaccagacagtacttgctgctgaatcatcaaagctaaggtcataaataaagagtcttagctctcaactatcataaaaaaaagcagctaaattcatcaagacacacacactggatttcctaagccctattatttccctagggttgtttagaatgcagaccagctcatgaatctaggaagccacaaggaataagacactagcagaaaaaacaggcctgctaaagttgggcatgatggctcacgcctgtaatcccagcactttgggaggcccaggtggtggatcacctgaggtcaggagttcgagaccagcctggccaacatggtgaaaccccgcctctactaaaaatacaaaattagccaggcgtggtggtgcatgcctgtaatcccagcgactcaggaggttgagtcaggagaactgcttgaatccaggaggcggaggttgcagtgagccgagatcatgccactgcactccagcctggagacagagcgagactccgtctaaaaaaaacaaaaaacaaacaaacaaaaaaaaaacaggcttgctaagttgggacccttcagtagaaaatctttttttttttttttgagacggagtctcgctctgcctcccaggctagagtgcagtggcgcgatctcggctcactgcaacctccgcctcccggattcaagcaattctcctgcctcagcctccggagtagctgggattacaggcgtgcaccacacgcctggctaattttttgtatttttagtagagacggggtttcaccatgttggccaggctggtctcgaactcctgacctgaaatgatccagccacctcagcctcccaaagtgctgagattataggcgtgagccactgtgcccagccgcagaaaagcttcttaccttgagcaggggcatctctcgggcctgctggattaaaaggtgcatttcgttgatctgctgccgcacaaggggcggtactgggttgcagcaagctatgatgccctgaggttccctgaagacaagtaagaacacactcaacttgtcactcagaaacgcagcccttaaaggcttccagataagaataatgactgggtaaagccaggctgccacctaagctgaagctacaggtaggtgactaaggaaacactgatgtcaggccagcctaggccaacttctccatgtgttctttgcgacaccaagctttaagtggatccctcttggagcctgactcccacaatcagggagagctgaaagtaagtgccatagcactgtggattctcaattccgcagggggcaaccaacgggctgtggattttcattcttgcttatacttcaatcaagatcacaaaacgtttaagatcatgagctgctttaatttggaagaaagtacagatgacagaatctgggacattttcttcccttgcaagtagatgctataaggctcagagacttaaaataaactcaaactaaggcataatcattgaaatgattccagttcagaagttttagtgcttaaatggcagcctgagggcagaaattctatattccttcaacttgctaccttccaagcttggagcattaatctctgagtaagcagccttgggtaatagcaaccagaaaagcttgattttgaagaacatcagatctactgagaaagtcagaacatattaatcagatttgaaactcacttaggcagttcttcagctattttcagcatcatgtggtttggcagtacatatctggaaaaaaaaaaaaacacacacacacacacacacacacacacacacacacggtggggacacattacattcagccagtaagttccattagatgctgtcacataggggaaataaccagctttcatagcaaaagaaaaaagcccattat

SEQ ID NO: 97099 - DNA, 15585 bp, Homo sapiens
ccagtatgactgccgagcactgaggggtcgccccgagagaagagccagggtccttcaccacccagccgctggaggaagccttctctgccagcgatctcgcagcactgtgtttacaggggggaggggaggggttcgtacgggagcaataaaggagaaactgaggtacccggctggcatcggtcctgccccatcactggctctggcccgggctgtgggcccccatcccccggggctgcagccgcacttggaaaggctgcatcttgaggatgacactgcagtggggcaggggctgcagggagggcagggcgtccccggagggcagcagcgtgaaggcctgcagcagtcgggtcagcaccacgaagagctccaggcgcgccagcggctcgcccaggcacacgcgggcaccgcagccgaaggccagagctctggagttcttgcctggctccaggaagcgatctgcgggcgggtggacaggtgggtggggaggcgttcagcggcagcggggaccagcctccaccacattttcacggcaggcccccggccccccacataccaggccagaactcatgtggcctctcccagaccgtctcatccaggtgggcgccttggaggttcggaatgatgactgtgccctcagggatgtcgtagccggagatgctgaagggggctggagttagaggctggccaggacctccctgggctcgggctttcctcactcatccccaaccctcgggagtcacctgctgggccgtgtggtgcggtggggcaaggctaagggcacaacgggccgcaggcgcagcacctcggcgatggtggcattgagcaagggcagccgtgcacggtccttgtaggggacccgggagctggaggcaccagggcccagttcgtggtctagctcctcctgcagtcgctgctgaatctggggaatgatcgggtggagtcctgccccagcagcccacagctgcccagcctccagccgctccctcagcaacccagtgagcctgagtgccggtgaggcaagcacagccccagccgcacagtgctcagagctgagtgagggtgcccaccgccctggccaggttgctgggaaggagccttttgcttgtccccaggacgcacctcagggtggtgaagcaaaaaaaccacggcccaggagagggtgtttgctgtggtctcagtgccaccgatcaggaggtccactgcagccatgtgcacgtgcccttccaggagctgtccagagccctcttccatgctcggctgcgccaccccttggagcatgtagtccatcatgtccctccactggcctgccacgaggctctcctgcagagggtgaaaggagcgggctgagcggctggcctggggagaggagtacagagtggcaacaggcccataactggggtatgcaaaagaacccgcctcatagcaatgctgaggccggtagcatcactggctgtgggccgaggggaggccgtccacacacagtccccaccttgtgctgcctcagctgcatctccacgatgtgatccctcttctctatggcctgcttcagcctccggagacctggattggggaagaactgcggcaggaagcatgagaatgcagctgtgggaaggagcctctccctccaccccagcctctcccctacaacccaggggtgtctaggctccaggtcctcaccctgagaaagggaatcacgtccacaatttggatggaccagtggctccaggtttttaacacctcctggatacatttgtaataggcaggcattaagttgtcgtcctgccagaaaaggagggagtactttcagttcaggacaaggagaggctcagggaggggctgggggtgggcctgaggggctgtgaggcaccttgatcttgtctccgaaggtgaggtaacagatgatgctgcaggtgaggagagagaattcctcctcaatggccacaggggtgccgggctgggctctcatgcgctgtggagaaacagtgtgagttcagcaggccgctgtgcagcgggcagggcgggggctactgtgagaggcgaggctgacccgaggtggcctcaggagcccagccttacctcacagaactcctgggtcagctgctccaccactggctccatggagtcacggatgcccagcagcagggctgagcgggtgagcttcttgtgggctttccagagcagggagtagtctcccaaggacaggtccgggtagttcctagacaccagcttgtctgcaggaggagttgggggctggagggtgggaactgatgaaggcagctgagggcctgaccttcttcggcctccccaacccctgctttctccccaccagatatgcccccccaagagcttccagggacctggattggggatgccccaaaggtggctcacacttgaggctgaggtgggaggatcatttgagactaggaatttaagaccagcctgggcagcatagcaagaacccatctcttaaaaaaaaatttttttaagaaagaaaaaatgcccccagcccttacaggtaagtggctcaggtctgccagcaaagtctgcccactttttgaccatggcttcctcaatggtcctcttggagttcagcaccaccacatctgggagacagccaaagcagcgtcagcggagagaggaccctctccgtcacctccgccccctcctatggtgagggccagagcgagatcagcctctcaccttgcagcccaaggtggagcctgtagatgggcccgaatttctgagtcaggccaagcagatagatggggaggtcgggctgcagcaggtgcaagaagcccggggcaagaggcgggaggtggaggctccggagcttccaccagttccacagcaggcgggcgccagccagcaggggcagcagcagcagcaggcccaggagcagcatggcaagacgcccgtcagggccctgaggtgccacttatagctcaagagccccagccatccctcctgctgtgtagactgttttggggcctcccttgaccccaccctcaggtgccttcccaccgacccacccacagagtggcccttttctggaatgacaccagtctcattggccttgggacgtccgtatttcaaaaaaaattaatcacccatcgagaagcaaggaagggaaatgcaaccctgacctttttcctgcatccagagtcagctttctggttccacatcacccgtgcaggcaagggtgtccgccccgacctgggccctctccctctgccaccccaccgtgggccagtttactggcatgatgtttgtctcagagagaaaatggcagtccctgcctaataggccttcctgaatcgcctgaagaacaaaatgtgatttgtgtgggtttgtttgttagtttaagctacagatagagtaatacagtttaagcctggtttgcctggggcattccagtatatacaggtatcccagtgtgattgttattagtgcctcctttcactcacaaaagtgcccagaagacaaaggaggaagtggtttcccgctgcggagtaatagcatgtaccagacactgctctaagtgctttgtgggcactcactcaactcttcacagccatgctctatatgcaacacgggtattgttcgcatgttgtggagggcaggattccagcctggaaatctagctgtcgaatatgtacctttagccaccaggagcacctttctttggttgaaaggaaaacagcccaccttgagctggtttgagataaaaaataagaattggggaatttcacagaactcaggaaaaagaagcagaggaggggaccccactggtcttagaaagtcaaggatagggaacagaaaaagccccggagacgggcggtttcctcgctctgttcctctctcctctttcttctctctgcagtcaagtttcttgtgtttccaggcacaggcagaacatgactgccctcaggactacagtccacaggttctactccagccagggaaagtatggattcccagcacaactgggcatgcccccctcaaagtccaaagtccccaggaaggggctggatagccacagctggatcaggatcaagggtccagccctatttggggaactgaagccataaggggtgggggtcccactggactgacactcagagaccacttttgtgggtaaggaggcagtttggggatttgggaagaggccatgccaaagaggagtggccgggttcagtgagaggccagggcctcctggatggtacctgagaggtcagaggcgacccagccccataccttcccccccatttctggctctgtgccagaccctcggaccagtgggggtctctctcccctcagagcttttccagactgtgctactgcagagccagagtcaagaccctggctgtgccacccactacattggcgagttcgctgctgctgaatccatgatcaggactgagagggagaaaacaggattgggatttctggggttgggcaatgacagctactgccttcttcatggttgacctcccagaccgggccatgtcttgctgcaactgaatccctggctccggaaaatgggcttatgccaccaccatgctgagcagctactgggagaaagatctgatgagcaaccatagggccatgtatgcaagagcctcaggaaacctctgccacagtgggaaaggcccaaacttctcaaagttacgtgggataagacagtgctcatcggaaaggagcgcacctggaaggctgacgtgcttactacttgtctcaccatctccatctcttccaccacttccaaatccaaactccgaatgtggtcaattacatgcaatgtccccaaaggtaccctgtcctgcccccggcctctgggcctttgtatattctccttctgccccagatgccctcatctacccctgctctttgcctggctccttctcagtcttcagagccccacttggaggccacctgctccaggaagccttccctgtccctgcctggcaatgcccctgacttggttagatgccccacaggaccacactgctccctgacatcacatctttcacagagggtggggactgcccgtcctcttatctgtctccccagcgatgagccctggagtgagcagctgtatctctggcacctggcacagggcatggcatgaagtgaaagattcccgaatttctgtcgaatgactggatggcaggctgctgaactgtcatgacctctacggaaactgatctcaccaaacttctttggacagacgcggagtcatctctgaagaccccaggtgtgccactaaatgggggaaagttaggcaggtccggtgggaaggggagaccccaggagaacagcggcttcctcagaggattcacaaacacaccaaagtcagacttttggcttgtttgaaaccagtaactggaagaagacactgccggacctgaggattgcacaactccgggaaagtcacctcattccactgataacagaaccaagcgtcagcaggctttcaacagcccggaactcagctaaaatctgcagacctcagaaccgccagcagcacgaggacagagtcggggaggtgtagctggacaacagctcatgaggcagaagagctgtgtcacaggtgtcagctgagcacaagccctgtctgaggccgtggtgactggcgacagccgggcagtggagggccttggaagctgaagggtggtcttggcatggactctggtccttggggtgcaggctcttgggtcccagttctgctcggggtggtcctgtgaagcactagactcctagcgggtcatctgggaggttctagcagagctgaacagcccaagggtcatcagggctcagagagtctaaggttatgtcaacctggcctgcccagaactgcatcgggcaggggcactgctctcagccctagcaacacacactgacacttcgctgccaacactgacactttgctgccaaaagcctttaatatgccctggtcccaggctgtgttcatgaaagcggacacagcagtgcttccagcttcatggttcccaggttcaggttcctcccagyggaggkgggagggcagccctcacacctggcacccctgagtgccatactcctggaggaagtcrttgagctgggcacaggctgcccgctggcgggtgctccggcacaggcgttcagagggcatctcctcgatccagctattcgagtccagcaggtactgggggctgcagggggcaaagggrcagtcarcagggctcgggaggatggcaggtggaaacggagagcacaggcatctggcttctgaggggcaaggcctaggtggcraggcatggggaggacaagagactgaggggaccagatgactcactgtccctcgaggtcataggtggccccatcyagacccatgatcaaatattctttcccaggttccaagcgaaggcggcaggaggctcgaaccaggaagttgcgcatctgattagcagcggccttgacatccttggctgcggggatgaygtgcgcaaaagtggtcagaggggaagagaaggtgcagggtgagcccaggctggggactctgtgtagatcctctcattccaccttcgccacccccatggagaggtgccactgcctccctatttatggccaagcccaaggcttctgacagcccaaggggattttcacacttccagatggtcaggtcctcggccacacctcagcctccctgtctccccccagccctgcccgcctctccggtttgcttcatactgaagtgcaggacttgggtgatcttggtctcaaagaggcggaaagcagctctgctgtcttctcggagaaccttaacctggaagcctaagagggggtgagragaagggggaaaggtgagttactttgaggctgagagggtaggaagttggtgtcagagcaaacaggctgcgtgcatgacctgtaagaggagcaggctacacccagagagaccaaaacrgccggtccccgagggagggtcaggccagggcctcggtgggaagactgaccgtactccacacgggggtagtagcaggcaaacttcatcctgtagccatcctcgtcctgcagaccccgctccagggcgcgacgctggcgagggcacttccctgaagttggggaacccatcagacagtgtggggggggccccggccatcccgcctccactgccccgccccaggccctcagtctcaccctcagcacactggcagacttcagcagaacacaaggtggccaagagtctgctcttacttggtgccccgtaaaacacagaacatctgcgctctggagaacagagaggagttagggcacaggcccctccattctgcctcctcagtcccagggagccccagggctctctgccccctcactaccccggtgtccattgtcccataggagggcacctatgccaaagttctcctgaatttcagggtgtcctgcagtgctcaccggggttgtagtagtcgtacagggttgcgctggccggctgcaccagccccaccggcacttcctgcacagcctcaaagcccacgcactcccgggaggtggrgacctggccaagcgtggggaggagagatgagggacccactccctgggccctgcagccccctgtactgggtttccttggcctgtttttgtttgcttcctattggccttctctccagtgtccttcacattctgttaccttcctactcagagaactctcaaagctgctccgcaaggtctctggtgacttcacttcccagagggtgaccttgccccagtcttcactgctccaggscctcagcagagtcttgcatcatggacgtgttctctgtgaaactgtccctaagctaagggttagcttctggaccacccttggttctgacctggtcatttcttacgttccctccttcggaacttccttcctcagagctcccctgtgggggtctcaaccactccctggcttccaccaaaccaatccaggctgatgattcccaaactgaacttgcagctccatccttgcattaggattgtggcaggacctgtaagttctccaaggcactctgcctgcccccaaacccactcgccctcctcgcggcctcatctttgtcatggatacmactgggtcctcctttatttgccacaacctaactgcaggttctgtcatcctgcctgaccccccgactcaggtcccaggcctgacccctcctcgtgcccacgcgggcccagtccacacggtgccgtgccagtgtccctcctgagctaggctgctgcaccgtcagctccctatccgggaatcttgttggctctgtgttttctattgtgttcaacccagatgtgtcagccaggcttccccagctgatgggggctggcccctctgcacacactgggtaggggtctccctgacctacaaacagctggctaatgacagccaccacacctttctcacattttctcccagaggttacagtaaatgttccaaaactttttttgaaggccgggcatggtggctctggcctgtaaatccggtactttgaaaggcctaggccagaggatcgcttgaggccgggagttcaagaccagcctgggcaacagagcgagaccctgtctttactaaataaataaataaaaatgttttgagagccgtaagagggttgataactattttagccaaataaggtcgtgaaaagacaaatacaactatcatctatggccaccatcactttgtaaaggaaaatacgctttaatattaaaaaaaagataggaagttcaacaaaaaaacaaaggcagcccctcaagctgaataaaaccagcattaggaaagactccctctcaaaccctgagggtccctgctgactggcatcggtccctgccgcctgcaggtctgccccttactctgctgtgtctcacgggctcacattcttgtccttctctctgatgacatcacaagttctcaagagcaccagccgctgacacagctgtctcctgagaaacctcctaacgcatactcagtaaacccggtgccatcgagtcccttcctgcctcatctctccccactcaccgagtcaaaatacagcaggacgtggggcccctcggtctcaaagtgactcacgtaacggtcagagagggaggtcagctgtggaaaaggggagttggtcacaggccctgcacatgacagggctcagtacctgggacagagggggttgccctgggtggctgaccacaccttctccaggtcagcacgcagggcgtggaatccactcaggagggtgacgtccgcgatggccatgccagacagccccaccttgccgttccgcctgtggaracgtgtgagctgtcgtccaggttctgcctgcgcgggctccagaagcccagccccagcctgggtcctgccctccctcccctggcccagggcagctcccggcgcccaccagatgcacacggtgtagtgcaccctggactcctgctcctccaccaccttgggcgcctccctcctgcggcggttcctccgaccctcaaacagctgcaggggtgtcacgggctgcagaggggcatctgggtcatccttggctggaagctcrtcgtactcatagtcctcatagtcctcgtttgsttccactgcacagggaagcattgtgaggagggctgggatggccacccggctccctgcgccagcccctgcctggccccaaggcctcccaacccccacactcactcgtgtactcgacgtggcctttgactgtcacttctatctgtaggtcctggcaggtcgtgttcttcatgtccaggacattgtaggtacgaaggacctggctcagcaaggggcagggagaggacgtgggacatgtgaggccacagacctctctggtgccatacctaagggcatctccctgggctacgggatttgaggccttcagccccttttcctccccgtcactgcacagtccacacacacgagtggcaccacattcgccacaggcgtcaggcgagacagagaggtaaagaagcaggggcctgcccccagaggccaacactccagactgtgctgggaagaggctggactgaaaagctcaggaaaggcttctggccaaggcttgaaggagaagaaagagcttgtcctgtgggccaagaagcagggaaggacaggaaaggcaaggggatctgtgtagacaaggagagctgtctggccggaggggtgggcagaggcccagccatctgagccgtgggcagcggggagtgacttttccccaaggctgatctggctggggcttttggaaggtcagtgtcactgccgtgtggacagtggatcagacaggggagacaggaggtagagagaagttccaggtagggagaaggccgtctcagcacagaatctaggatgcagcaccaagggccacaggcagcaggggagcagaggaggagtcactagggacataaggacaggcttgggagaggggccactaacacggcctctagagtagtggctgggctcctggctgggaggggctcccaccagccagacaagagacacagaatgaagaagggctttgggacatgcctcgtctgaggtgctgtgggagtgggacgagtggggcccatggttcagggaagaggcctgggctgaggagtgggattcggagccaccagcactgaggcgggtaaaggaaacaacaggtacccagagatggggagagcaagcgaaagcaagcagggggaaaaacacccaggacggaagcacgggacaccaaccctgaggtgtctgcctccttccccggaccatgtgcctctgcccacaggcctctcactccacaccctctcctccaccagtgcctggccccaccccttccctggccctcaccttcagggttcctttgctgtttcctcccaccttcacattgatcttgctgcccaaggaaaacttcagcaacagaaaagggaaggcgatgttagaagggcacaagcaaacctgtttttgcggctccaataacttatctccttcctcaaaacagccccacctcctctccccacctcacatttccacaaagtttataccagcacatgaattatctcacttcagccttctaacgaccctgtagggtgaactctgtgtatgttactctacaagtgagaaaactgaagctcagagctccaggtcacgcagccaggaagtcagtcttcccccgaagaccccaggaagaagtgctgcggggattccacgggtgggagggtggggacggcttctggcctggccacgaggcccaggtgtcctggctacccaggcgagggagtggttcaccagggagtggttcacctgcagctcctcctccaggccgcgaatctggcggttgttcagctgcagcgcgtgggacttgaacccattccggcctgtggagctgagagtcacattgagacccctctcctcagtggtgtgggaggcaatccagtaggcagacagggcatccagggcaatcaccgtgtcctagggaggttgagccaggactcaagcaagcccttggtctgaggactacccacccccgccagagcccggggacggcccctacttgggtactgcggaatcccccttggaagctgccctgacgggtgagccaggccgcagcctggtctgccatctctgctttgccctcgtgaagcaggaggtgcagcagggcgtaggctgtggtttcaatccacagggctggggcctggggcatggggtcggatgggttgcgaggagccggggtgggcgacacggcattgctctgagaaccagtgactgagccccagtacaggttatctgaaagtgaagggagaccacgagtaaacaggaaggcagggagaagagcctggtcccctggcccttagccaccccctgctgggctctcctgagtctcccccaacccacccctgcttataacttcattcctcctctgagtcttcatccagcctctccctctgggcacactcagggatcctaaggtcccctgggcctcaggctcactgccagagcgcctcacccctcacctccagtctcctgggccattgccatgaggttgttgtgggcaacaccccgcaggtccgcaggggccttggtcagtgtcagggcataggccgtgatggcagctgcgtgggcacccaggagcccagcacttgctttctcccccaaaaatgagcttgcctttgagatggaggcttcctggaagaaaacgggaggagggtcttgggcctggacccctgggttcctgaggaaaaagggagagagctgggggccagcagagggcagaaacgccactgaacttaccactctctgcttcaatggctctgcaccctcatcctggaagacggccagcccatgatgaagggcgatggtcacaaaggctgtgagtgccacagtctcatcattgcccaccaaacccccctagtaaggggagaaaagatgtcaaacaggagggggaaggggcaaagagagtcctccgacaggcgcttctcgggccagccccagcatgcccgcacctgcatgctcctatgtatcactggagagaggtcctggaacgagccgtcagcctgctgctgggacagaagccagttagatgtctcctgcagtttctcaggcgagcctcctacctgctcctgggccaaactcaggaccttcaacacaaaggctgtgagcctggagggcaggaaaggagggttggggataaggacttgcttctcattatgcccacgcccccaggtgcctggttatccaccctcccatcataccagctctgtcccacccctgccccagccctgaccccctcagaaccctggaaccactctcccaagctcaccaggtgctgctgccccgtgacaaccaagccgcataggaaccatccgccttccgaaactgctggatccgcatgtagccttggagaggagaggtggccgctcaggtgacactcacccttctgctgtttgagcccaaggccatgctccccatcctcatcaggggccccctttctttccctctgtagcctcctgggctgtccatcttccagtaactgtcctttcctggcccccctcctgcttgcccttgcacccagaacctttctggatcagatccacggcgtggtccttggtctcgggaggcagtgtgctccactgctctgtcttgtccaggtagcgggaagcagccagtgtcggagccaagtagatcatggtttgctccccacagcctcgaggaagcctcaagagggaggccacgcctcctggtgacaaggccccctcagagcctaaagtgtccaatggatctgaggctacatgggagggagagggtggaggtctgaggactctgtgtcagaggctcacggggagtgggaccaagcagggatccacaggtcccacatgaatccgaaggtggccactgggaagggactaaagggcactcccacctgtaaccctgacgtagctgttaaagtccccatcagggatcatattgggatcagagttgccaggtatttccaaggtccggcctcggtggtctggggaaatgggggaagttggcagcctgtcctgctgtccacatcccccaccacctgtacccacttaggaaaccaatggctggaggtagagggtcactcacccaaggggttgagttcatagaccagctcctctctatggatggccccttccttctgtctcagggaaaacatggttgtgaggtcacacaggactacagcctgccctgctagcacagactcccccagaactttgagtttcaactccagggacagagttggatcagaattgtagaagatgggaacagaccaaggcattggttcgggtgttgggcccctggcctggccagcagagagagtgctgagggtggaggacaaagctgggggcccggggacttatattcaggggtgctccattcacctcaatctgcagaaccttggacaccgcatctcccacagggaattcgaaggaccctcgagccaccaccttcagagacacagcggcggctgccgtgggcaccacagagaaggcaacaggccgggcagagcccgcaggcaccagcacctgctgggccagccctccgcccccagccaggcacagcccctccactggggacacgtggacgctcacctgagggcaggaaaacgaggatggccagagtcctggcccggttagcctccccacccctcactgggccctggctcccccaactcctgtatgctcaggctcccatggggcctcacagtcaggtttttatccaggtagttatagaggacaggccgcagctccagctgctcaaagcggcggacagacatgggcaggcggaggtgcaggtggaactcgcggaacacccggagctggactggggtggccacacataggcctgagggaaaggaagcgtgggcacaggggcagagatcagaggggccatcaaagcttcagggccacaggagggaggggtgggggtgacccagctctgtctcagtccgcctctgccctctggcccacgccagctgcacgctggcacagacctccccagatcactggaccctcttcctacactaagagcaaagggaacagggagctggggtacagggaaatggaagcagggtcacctgaggcccagacagggtgacatcacctttggttttggacaggctcaggccatggatctcccacgtggtcagagagtcggggagccacagtgtcaatctgtgtagggaaaggcagagaaggcccgtctaccccggctggccccgagacacagcacagagaaaaggccgggccggcacacactctcacatttgaaagcggtccactgtttccactctccagagccagttctctgggaagaagctgcgcacgggaatgtcatcctcatcaatcaggtcctcctcctgcaggatctccagggctgggggaccacggtggacgggagtgaggaggggaccgttctgcctttccaagcgccgccacctgtgccctagccccacccagcccctcacctcgttggaggcccgcctggcccttgtccctgctcttcttgcgcagactctcagcaaattggcagcaggacaggaagggctcccggcagtccggctgctgcacgcgggctgcccgctgctcgcaggaacgcatcatgggcagacgtgtcaccccatcctggcagcagcgcttggctgtcggggaagcatactgacccactgcagggccaggtgggggtgagcatgagaggacaaaaaggacatacacctcagcccccgccccgaccccttgagaccagcaacataagagaggctgctggagagagctgcccaccttccactcgtaatcccggaattcggatctctggccccaaataccacacgtgggttcagcaaggagccgaggggcagagaggcagacccccaacccggatcccaggtggagagcccaagctactgcctaggcacccgcaactcacatttctcattaatcgccttttggaagttcacgtttctctttttccgggttgtcttctccttgggacagcttagtcctggtagagagaaaggctgcagtccagccgtcaggcactcggcctcctcccctcctccccttcccctgcccagcccttcctgcccg

SEQ ID NO: 97100 - DNA, 82682 bp, Homo sapiens
tgcatatcaggccttctcctgcctgacatttacatcctcattggcctttctggcatagtcttgatgataggcttcctctaccctgtaactgcaggcagttccctgaaattgctctacagcttttgcacactttgtccagaatgcttggtttcagctcgcctctgtctttgctgggaagccatcgctgatctcctgcctccttgttcccacagcacaggtgctcatcaggttgacatttctttctttctttctttttttattattattacactttaagttctagggtacatgtgcaccatgtgcaggtttgttacatatgtattcatgtgccatgttggtgtgctgcacccataaactcgtcatatacgttaggtatatatcctaatgctatcccttccccctccccccaccccacgacaggccccggtgtgtgatattcaccaccctgtgtccaagtgttctcattgttcatttcccacctgtgagtgagaacatgcggtgtttggttttctgtccttgcaatagtttgctcagaatgatggtttcccgtgtcatccatgtccctacaaaggacatgaactcatccttttttatggctgcatagtattccatggtgtgtatgtgccacattttcttaatccagtctgtcattgatgggcatttgggttggttccaagtctttgttattgtgaataaacatacatgtgcatgtgtctttatagcagcatgatttataatcctttgggtatatacccagtaatgggatggccgggtcaaatggtatttctaggtctagatccttgaggaatcgtcacactgtcttccacaatggatgaactagtttacagtcccaccaacagtgtaaaagtgttcctgtttctccacatctcctccagcacctgttgtttcctgactttttaatgatcgccattttaactggtgtgagatggtatctcactgtgatttttatttggatttctctgatggccagtgatgatgagcatattttcatgtctgttggctgcctaaatgtcttcttttgagaagtgtgtgttcatatctttcgcccactttttgattgggttgtttgattttttcttgtaaatttgtttaagttcttagtagattctggatattagtcctagccaaaattgacaaatgggatctaattaaagagcttctgcacagcaaaagaaactaccatcagagtgaacaggcaacctacagaatgggagaaaatttttgcaatctacctatctgacaaagggctaatatccagaatctacaggttgacatttcattacttatctttctccccctcaagacggcaagctctctgagggcagagtccatgagttaggtacctattttctctctagcacctggcacaggcctgttgcttttctagttatctaatgagtgataactgatggcagatccatcctgtaggagtttgtggtcatcatggcctccagtgtcacaagcctcaatacaggactgtgggggtattagggcccctcttctgacatggagaaaaggggctgatggcccttctgactagaagcttcaagctgattcatggttgcaaatagtcaggattatagagattcttacagaaaagtgctttactgactgtgtccctatccagttccttgcctttcagaaagaaagaagtgcagattgcctaactcagcagagcaaagatgtaactttcccatcaacattgggagactagaaaaagcagattttcctttctgtcctgagggaatttcataggccggttcatccttccctgtcttcagtacccagtatcggaatgctgatcatcctggtttactaatcttaatacttttgatttctaggttccattaagtgaatttgacttttcctggtctaaaatttctgacattcagtctcaggtatgtgctttttaaacgtttgtgagtaaacaggaaccttgtcccagcactctgtttgtagtgattcactgggcaatcactgtcctttgaagtctaccctgtcctaaagtgaggatcaggctgtgtagtgtataaggtttcttgctattctagttatcaccactctgtgccctctttaaatgttttccatggagtggctttgctctaggatatttaaaatctggtgttttggaggtttttgtttgtttttgtttattaaaaccagtgtttctttctatttcagcttgagaaattgattgaaaagaattactttcttcataagtcagcccaggaagcatataagtcatacatacgagcctatgattcccattctctgaaacagatctttaatgttaataacctaaatttgcctcaggttgctctgtcatttggtttcaaggtgcctcccttcgttgatctgagtatccttttctttaatgaagttatcctgtgactaaggaacaaaagcttgacagaggggcatttggggctttgcagtggattggtatgtgttctggctcagactggaggctccagtgttcaccctggtcgatgtctgcttttctgtgctagcacaggacatagaggttggatggggtaagcagggcttaatcattaggatggggttacagggacaaggcagcttatgccttgagccttcaaaagacaaagaaatttgactgtcaaggagagacagagacagttgtgtgttccaggcagaaacacaggttaaaaaaatcaaaacttcagtgtttgctgaggctgcactgtgcagggtacttaggtgaatggggtgttttgaagctaaagagaggatgggacctttcaaggagttttaatcatcttagaacccctgaaggattttatgcaagaaagtggcaagttcagcaaaagaaaataaaacttaggtgttgcttaagataaaaggcaggagtacttccagttgcttcagttgtgatttataatttgtgcctttcagaagaagaaactgagcagctgaaatgaggcctgtgcttcagtgccataggggtaacttctgagggaactagaggaccaaattttgggtcaccatccccattgtcagcattgagtaaatgtcagctgaaatgaatgtatgtcgagtcctgtggaaggaagagcagctccttcacttaggcattcctaaatcaattccgaagagaaatgatagtcatttgttttgacacaggaggtgtttttttaatgtgctcctaccaacttcctgattaaactcataaatccttattcactgtcatgaatttcatcgtgtggaagaaataattaatatgactattacacaccgaagtttaaaatcatacctgctaatttaagtccacagtcacgtggccactcctaattttctggaaatttattgcataggcttatgttcccacattttcattgttgagaatggggttgtggaggaacagtagtgttcatgccggtttttttctctgtgtagatgttagattggagttcattatcttttttgcttgatttccttaatgtttgcctccagacgtcaacagtaatgaaggcaagcagaaaaagcgaggaggtggtggtggatttggctaccagaaaaccaagaaagttgagaaatccaaaatctttaaacacattagcaagaaatcatctgacagcaggcagttctctcactgaacacatgccttcctttcatcttgaataactttgtcctaaaatgaattttttttccccttgatttaacaggatttttgtagactttagaatttggacttacctaacaagagtataaattgacttgggttgcaagcactgagcactgttacttctatcacgtctctcttttatttctgggatataaaacaggctttaagtttcttggttgcccaagggcagagcaaggaatatctggtgtttcttgtgatgataatattttaattttaaatatccctccctcatacaagtgtatgttaccattttaatataattctttttgtacctttccttcttgttttgtgaagatttttgtggcatggattgctgtgctcactgctgtaaaaggtgacctagtgtactgggcagctggtggcggtgcagaaaagagtctcaggttattttttgtttttagttatttcttggaccttgacagtatctaatgactcctcctgaaaatgctgcagtataaaagagcaaagagctttgggaaatacctaagaagcaccttaagattagggtggcattgcttttatagattcttgattttaaagcaacaggcctttctcaggtgttgcattttttggagcaaaaactatgggttgtaatttgaataaagtgtcactaagcagttataacgtttgatggctggggggtaggaagaggatggaattgagatgtttgagcctcatttacatcaatagaggtgtaatgtactgcatttcttcatttggtaacataacaaagactttcatacaaagaacgatgatgctcctcattaagatttgtttaattcaaggtggtttggatttggtaagcctttgcactctgtagagtacttagaagacaagggcaacttacttggagttagagccaagctgtcagacggtgcccagcacacattaatgttagcttctttctgagaaaaaaatacctcttccaggccctgaaacaaaaaatacatttgctgtgaagattgaaaatgaacaaagttagaaaaaaaaacagcaaaatcagtgatttagtcagatgagtttttcgttgtaggagcacttgatttctagtgtgttttgtacagtatataactacaagatagtacattttgtagcagttcaaagccaaagttgctagcatcattttgctgttgtgccagttaatcataggatcccattaaataagtgtgctaacatcgaatatagagaaaactggtaaagaacattccagtaggaaaagaaaagaacaatcttccatttctgggcttggccaccatcaccctggtcggacctgtcctggacttccaaccttgactgctgagctcctggcttagcttcttgggttcctaattcctggtgtttaataattctctccacgatcatgtttttctgattttttttttcagaaataatgttttttaaaagacaaaaacaaagggaagaatatttaattactgagcagaagtaaatactgttggtattttgtacataatctaatttttatatgcatgtttatgctttttaatttttttatcaaaaattaagtcatctacctactacttgtaaccagcttgtttcataacatgttattttcctgtgtcattaaataattacttcaatgttgtatttcgtttatggatgctttgttgacccttgtttggtctgccaggatttaggttcaagatacctacctgaatgtgccaaactggctgtccctatctcagtatgtcttgtgctcagtagtcttgagattgtttacctctagtatgagtcagtctctagaggttttgtgagaaaagcatataaacaaagtggacagggttggccctgctgtatgagaacttacttcaggtccattagcagcctcatctatgatctccattacctgtagtcacaataagatactttgagaggccacatttacatgactttttttacagtatattataattgttttatgttaatctcagtgtgctaatttataaactaaactttgtcacaggtaatgtataggaaagaacagagagagggttcagtgttgtccacagtttcagacatccactggggatccaggaatgtatccctggaggataagggggaactaccgtattcgctgggtgctgtttgtgattgtagtggcaggatggtccaggctagggacaagagacaaccagacttgaccagcctggccagattcagatatgaaggagccagttactggtatcacgtacagtgagtgaaagcagcaccatctgcaaggctcgtgcacagtaagagcttcatttggtggcaaatgtgagcgtttgacaggtggaattaggtggctgcagccatgaaggttcgaaggcagaatgtgaggtrggggagccaagcacatcactacatgcaggtaagtctttgggtcctgtgggctgcaagtgatgacactgctatgtctaaatttatttagtctcagccagctttgtataaataaaacaagatacccaaaacaggatccctaagttatacagggcttaaaagtgagagctctgtaactagaatgcctggattcaaattccagctgtgccacttgctaacctcagggcctgattcatgagtgaagcaaaagtaatacctccttcagaaggcagtgctcaggacagtgccctggtgctgagtgctytgtccatggtaccggcctccgtgcatcctacgtgaaaaacttgctgccatacagcagcaggtacagaggctcatcccaaaccgtgagccagtctgggctttggcatacaggatttctaacagtctggatctcttggaattctggagagcagacttgggctttggaaagcggtccagtcctgcagcaccttcctaaggtagctgtcaagtatattaatgctgttttcaaggttactrtactgagtatggggtggcaacaacaacagtgtgcgtttggataacctaattcatcataaattaaaagcytgttagatgtcataaactgcagaggacacagaagaatacgcccagatccttcttgggatggatacagattagagaaggtaggcataaacagttgcaatattgttttctaaatgatgtgatagatgcaggcaaatattccagctatttttattaagcctagaaatcctgcatcctcgggtcctagtggactatgattttcttgccccatctctaggagattctgattcagtaggcctttgccagggcagaggtatgtaggtgatgctcacgctcagctaggtttgggagcaaccagactagaacccattcacatacagactcttagtaaatgttttctgctctcatcttgcaaagtgaaagtgcccagcacaggcaatggtgttagtacgttgtagtcattcacaaactagggctgcccagaagagagacaggctgggactttcgagagagaaacagctgtttcatttgaatgcctggtgtgggaagaagaaggacagcctagcttcatggaaccttcttgcaccaaacaaagcctccagatccctccacagtgctccattcaatccctgtccattggtggtggaccaaagaagaaaccaatttgccttggccacatgtctttgagaaaaaaagccactctcccttctgggactcagagcatctgtacctgtaatataagaggggaatgtggaaaattctaactggatgatcacttttctgtggagggaaaaacacattttttgttttaaggggctagccagcatcaaacctttttttgagatggagtctygctctgtcacccaggctagagtgcaatggcactatctccgctcactgcaacctccgcctcctgggttcaagcgattctcctgcctcagcctccttaatagctgggattacaggcatgtgccaccacgcccagctaatttttgttgttgttgttttgttttgagacgaagtctcgctctgtcgcccaggctggagtgcagtggcgcaatctcggctcgctgcaagctcggcctcccgggttcaygccagtctcctgcctcagcctcccgagtagctgggactacaggcgcctgccaccacgcccggctaatgtttttttgtatttttagtagagacggggtttcaccatgttaggatggtctcaatctcctgacctcgtgatctgcccgcctcggcctcccaaagtgctgggattacaggcgtgagccacctcacccagtccgcatccaaccttttatttggagacaatacctttcaagtactggtgggttactgagatcacctcccatcagacaagcaaaaacgcctcccatgcagccagggtggggctgtgacctgggtttggctaatcacatacatttgcccagagtgaatcagatactaactaataaaacaggagcagaaacagtagatgtagcagctttctcatccagggtccagaggcagctgtgttgggaacaggcagctccagctgtggcaccccgcagcagccgtgctcacaccaggttgagagtgactgagtgtgtgccatgactttgtccagggtcctgccctttagctacctgcccttgttcctgcctattttgcaagcctagttctgcagccatttcatatcctttcaattaattctgtttcagtttaaattactgagtggctttttgttgctcataattagcccaaggatacaataaccgctaaggtctggtttctctctccctctttttgtcaaaatgtccaggttgcttgccaccattcttgtcctccctgcctggagcctcytgcccctcggcacagggaaaattggacattttgagcaaggccaggactttgaaacatctagggcaaggatgcgtcgaaaaaagaacaagtggcaaactcacyacctcgggacaggtcatggggaagctgctctggaggtttgggaggcaggcaaaagcaggatgcttggcatcgctgagagcctctagaggagtgtccacagctgggaaagggggaaccaagggttgtcagacctcccaaggcagcactttctggagtcaggcagaatgtacaggagccttggagcaagtgaattccctgctctgtgcctcagtttcctcatccgtagaatggaargaatgaaaacacaaggattaggtgtacagtcaggccaagtcagatcttagaaacaagacctaacgacactattatcaggaacatcaggaaaaggggaagaaggtcagaaacaagagttttctaggacttaccggtttctcacaccctctccccaccatcaaaatcatggtttcagaggcattaggccaaaaaactgcaaaagggagcctccttctgggaagtctccggcccttccgcggctcccggcgtctccagcagagggctctcggctgtgccgactcaggacagctgctgcgacggggccggctacgcttgtcagagcagcagctggtgattttggacttgcctttgctggcaggggagcgctatcgagggttcattttatccagcttgaggaaagaraggtcggagtgtaggggaagagtgggacaaacacgcgacccagtcatgccgagagcatgcgctgagggggacgtggagcgaggagtggggctccaggctgctgaggctccggaccaagtgccccctgcactttcaacgccgtaggtctcccggcagccctggaaggacagtcttacccggacgccacggtggtctcccggcagccctgggaaggacagtcttacccggacgccacggtggtctcccggcagccctgggaaggacagtcttacccggacgccacggtggtctcccggcagccctgggaaggacagtcttacccggacgccacggtgagggaggagaagcgcagagtcagccgcagacgggagggcgatggcctaacccggacgccagcgcggtttgctcagccctagggccgggcgctttcccgctccctgaccgcctcctgttcctccgcaggccgagctgcccttccctccctgctgcccccagggaaggctgctggtgtcctcagatgcgggcaggaggaacccgccagcgcctgagagcctggcccgaaccaggcctggaggtgctggggcgaagacacagaggatgtggcctccatccctggtaacagayggttaccagggcggctttgggtgaggacattgaaaaaggtcagactccctgggagcagcgccctggactccattctsatcacaggtatatttgtgtggctactaagagtaagagcctgggggtgcaggagtgattccagccccctcctacaaagtcatgtgagagggatctgaagaaaatccaggggaaaatgtaccacagcgaggaaatcgccatctaaagggctgaacgctcaagaacggcgttgggtgggctccgcgttggagttgagtcccgaaggatgttctaacagcaaaggggagaaaggaagagagaagccaaggcgtgcgggcaacgtgaaccgcatgagccgaggcaaaggggcagcgtggggctggaccctggagtctgctcctgtctgaattctagtgctgtcactgactagcaaggaacttccctgtgcctcgtggctgtcacatggaaagacagcaccgccatccagcccttataccgtaagggttatatgaactagcactgtgggcattagcagagcatgctgtacactttggtatattgtgagaatgaaataaatcaacaaatgcaaagcaggttttgcataacaaagactaaacaagtgttagttagctcctttcctccttcccgcctgtgaaaatgctgtcttatgatgtcctttaattatttcgtgtggttaagcttcagcttattggccagttcatccttgtagatacaagtatttttaaagcctccaattttaatttcctcacagaccattgctgtacttgtccttacatctacttcatactgaaattttctttctgtttctttatgtctctgcatctagaccagtggttcccaattgaagtcagttttgctcctcagggcacacttaacaacatctggagacatttttaattgtcctgaccgagaggacaatgctactggcatctagtggacagaggccagggatactgctgaacatccygcagtgcacaggacgcctgcaacacagattatccagccccaaacgtcaatagtgccggagttatggaaccctaatgaagacaattcttgaaggcatagactgaatcttatttatctttgtttccctcatgtctcacaagcagagtatgagttcagcaaataggagttgaacagaaatcaggaggaggtgctgattgacaggaaaaaagaaagatttagtttagagctgagaattcagctggacagccataggggctctggcatggagactggaagtcagaagagaatttgcagcaagacatttagagccatttatccagccatcataattttattgagtaactattttgtgtgaggcactgtactggatgctttggcaacagagataagcaaggcaacccctgtgaataaggcactcctggtctacacacagtgggagaaacatagaaattcatctcttctgagcggagcctgtgggaacccagaggatggacacccagcgtggtctgaggaatcatgggccaaaacaggaggcatcaggagagatctcttgggtaaagaagagtgagggctggaaggatattccaggcagtgggaacaacttacataaagtgagaatattgcaaatgcctagcgggtctgtagtgagagggtcatgaggcggaggagtgaggtgcgtagcaaggaatagcaggtggggccagagcagtaaaattaaccattgttctatttgaagaagggtaggacgcatttttaggttttttggctatttctccttttggtaatagcatctattttctttagagaattatctcttccccctcactcctctcctagtggaggtacaggcatgagaaaaagctaaaccaatgacatgttctcaaatataacttacaatcccaggagtcatgatgaaatggttgaaaaaaaaaatagttgaagctcactaaccttagcatcacatttcaatgagattgtcaaataattcttgtttcccaggcccccagagctgccgagtttctgacttctctaagccaggttcacaagccttcccttcaattctgtgaggatttttttccccatttttcctgaagttacgtggtcactttctgttacttgcaaccagagtaacttaattgataaagtcagtgaggaaggaatagaatacaacaaatggcttaaaaacagaaggccaagcgtgatggctcattcctgtaatcccagcactttgtgaggccgaggcaggtggattgcttgagctcaggagttcaagaccaacctgggcaacatggcaaaacyccatctctaccaaaaatacaaaaaattagccgggcgtggtggctcacacctgtagtcccaatttctcagaaggctgaggtgggaggatcacttgaacccaggaggaggaggtttcagtcagtagagattgaactactatactctagcctggatgacaragtaagaccttgtcaaaaaaaaaaaaaaaaaaaaaaaaaaaaaagaaggataatcaagacaatgagctaacacagaagccatagtggactttcttcaatattttaagaaaggtgaaaaatagcaggaatttaacctctcaaaaatgctattcccattatctattcttcctcagctacaaagcccctgatttcacctaggcacatggctgcccaaaaaagacaaccctgtctggccccccttaaacctgattgtagctatctaagttgtagccaatgaggtgtcagaggaagtaccatgcagtgcaacttcttaagtagcctagaaagatggggtcacatccccctgggttgtttccttctttgtgtcattttgatctctctcgctggaaaacagaaatgatgtctggagtgtaagcagccatcttgggctaggagactacatgctgacatggtgacacaccacccagaaagaatctgagtagtcgatgatcacagagctaccatatcagcactagactctctacctccacattttatttgtgtgacatagaaataaagtttaagctttgttttttctggggtgtatgtgtgtacacatgtgcgtctctgtctgtctcacatgcagtgagacctaattctaactgatatgccggtaggatggggggaccttgccacaaggtataattgtggtgggatggctgtgtcttgctcccattcaggatccatggaaagctcctcctccttcctgttcccctggatgccaagcgatgggcctgagaccctggctttgccatgtggatgctccccctcaggactttggatgtgcagtgattgctacaaaaagggcaatgaagatgcctggaccacagccacacagtctccatcacagcagtggtattctgtggaatgagtactaattttctggccacattttctgttaaaaactggttgttgagctgcccacttgtcttggtcaagggatgctggagtggcctgggaaggcagtgttgtttgcttttcttaggatggaacacacttaggcatatttttggtcaaagcaaaagaagaattcaaaggtgagagaagttgaagataaaaaggggaaaatgagggtagcagatgaagcaaagtcacacagaaagctggcaggcgagtagtagaatcagagtacaggctgagcatcccaaatctgaaaatccaaaatcggaagtgctccaaaacctgaaacttttggagcaccaacacaatgctcaaagtaaatgctcagtgaagcattttggatttcatattttcagatttgggtttgcccaaccggtgtaatacaaatattccaaaatcaaaaaaaaaaaaaaaaaaatctaaagtctgaaacactcctggtcccaagcattttgaatacaggatactcaacctgtatgacactttcctattggaccctctttcctaccccaaataatacttaataagtttttgtttcaaaagtgccactctgagcatctttggctataaggagcagagtcacattctagctcccctggcacctgcttcacaggagcccatgtgagaagaccaggttctggtcaggacaggcatacctgagagctgttggggtctgtgatctgctgaaaaatgacttctcaatgttcttcacatcctaatcctcagaaactgtgaatatattactttatatgacaacagggattttaaagatgtgattaagtaaatagtttggagatggacagattatcctggattatccagatgggcccaatgtaaacacaagggccctcatgagagggaggcaagagggtcagagaagatgctgtgacagcagaagcagaggacagagagtcgcagagagatttgaagatactacacagctggctttgaaaatgcaggaaagggccatatctgttgcttcacaccactaagtttgtgataatttgttacagcagcagtgggaaactaatagagcatctttcctttttttctagttaaaggactcacttgtacgtgtacacatttctcaggagtcctgtcaaccactgggaagaaagaggctggacttctgcattgaacccaggaacggggtttcacagcaatggaaacctggggttaaatatcaatggaaccttacatgacttgaagaatctttaatacaagctaggttttgaccccaaattagacatttggcagcctctcattacagtctatcttgcaaacctcagtgtggcaaggaatcagattcacccacactccctagtctaaaggattgtcctctgatccttccaggtggattaagccctttctaatctgtcatggacagagcaatgtacctgcctttgtttgttttccttaattctttcaagtgcctttgggtaataaatggttgcgtactcaggtttttagtccaaattttttttcttcaactctaggtaattgctttacttgccagaataggttaccatagcaatattttctgagcaataggtgaactgaattgtactattgaggaagcccaggagaaaaatactaataacaacctgagaaagtctaatcactttatggagcctcagggctgtgaagagggggataagacggactccctgggtgattaggaagtgctgctgccagctcacacaggacgcaatgtgagaagccacccatggtccccaaattcccccatctcctgatatccaagtcccccatccaagctgcttaaatgacaaaagacaaatgtaaactggggaaacatttgaaatgcatatcaaaaaggggtatttcacaaagctctccaacaggaggcctaggaagatggtaacagcgataccagaataatgtttggatcttccagagtgcccatgtgaaaacagagcaaccaaactgaaaagccatggacaacaaaagtcggtgacaaagtgtcaccttgaatcctgaaatacaagtragtggaattgctggtcgtaattctacgattagcttattaagaaactgccagctttgcacagcagctgcaccattatttattacatttcatgagagctgcaagttttttgcctccttgctaacacttgttatttatatttttcatttttcttatagccatcctggtgggtataaaataatatctcattatggttttgattacattttcctaatgactcatatcacttagcatctttttaggtgtttgttggccatttgtatatcttctttagagaaatatcttttcagatcctttgcccttttaaaaattgggaaatttaaattgctgagttgaaaaagttcttcacatatgttggatactagactcttatcaaatatataatttgcaaatattttctcccattctgtgggttgtcttcactttcttagtagtgcacaacttgtcaacttgtcctttgatgcacaagtttcaaattttgacaagcccaatttatccattgttttcttttgttgcttgtgccttcggtgtcatagttaagaaaccagtgcacaagctactgctctgaagagtttcctctatgttgtctcctaagagttttatatttttagctcttaactttcagtctttgatagattttgagttaatgtttgcattaggtatgagataaggattcaacatctttcttttacatgcggatgttccagaacaatttgttgaagagagtgttccttttcccatagaatggtcttggcactgttcaaaaatcaattgaccattgatatatgaatttatttatgaactctcaattctgttccattggtgtatatgtgtatcctgatgccagaaccacacttttttgattactgtagctttgcagtcagttttgatcctgtgaattatgagtcattcaactttattcttttctcaaaattgttttggctattccaggttcttgagattccatataaattttaggactgagttttctatttctgaaaaaaaaaggctgttgtgattttgatatggattgcattaaatctatagattgctttgagaagtaatgataccttaataatataatgttgtctttcaatgtatgaatayggcatgtcttttcatttatttagttcttttaaaatttctttcagtgatgttttttagttttcatttaccagctttgcaactttttggttaaattcattcctatgtattttatactttttaatggtattgtaagtagaattgtttcttagttttattttgaatcattcattgtttgtgtatagaaatacaactcatttttaagtgtggatcttgtatcctgcaactttgttgaattaattagctctaacaattttttgtggattccttagggttttctatatataatatcatgtcatctgcaaatatagttttacttctttcttcccaatttggatgccttttatttctatttcttgcttaattgctgtggctagaactatgcttaaccgaactggcaaaagtgggcatcctgatcttcttcctagtcttagagagaaagctttcagtctttcaccattgcatattatgtcagctctggctttccatatacgatgatggtcctgtatcatgttgaggaaggtccccccaacattttttttttctttttttcttttcttttttttttttttgagacagtctcactctgtcacccaggctggggtgcagtggtgtgaccttggctcactgcaacctccacctcccaggttcaagcgattctcgtgcctcagcctcccaagtagctgggattacaggcatgggccaccatacctggctaatttttgtatttttagtagagacagggttttgccatgttggccaggctggtctcaaactcctgggctcaagcaatccgcccacctcagcctcccaaagtgctgagattatgagccatcaccatacccaactggaagttcccttttaatcctagtttcttggatattttgtcttcaactgatgttgaaattgtcaaatgctttttctacatgcaagtacaacttgttttattttatttttttattttttttggagacagagtctcgctctgtyacccaggctggagtgcagtggtgcgatctcagctcactgcaacctctgcctcctgggttcaagcaattctcctgcttcagcctcccgagtagctgggactacaggtgcacactgccattcctggctaattttttgtgtttttagtagagacggcgtttcaccatgttgcgcaggctggtctcgaactcctgagctcaggcaatccgcctgcctcagcctcccaaagtgctaggattacaggagtgagccaccgtgcctggctgcaagtacaactttttaaagaattagaaacaataccyggaggttgtcttgtcccttctcctatttcatgctcaagccatgcaggaaagggaatcaagttttattttctactgtgattaaccgtaattagcccttcttgacgtcattagtgaaaataatagttaatatttgcccaagaaaatgtttaaagaacaacagagaatttccagaatttgtcttggaaatttgtcatgacagagtgagggctggggctggttgtgtgacttccatcacctgtatcatttcacctagaatacactaggcgtttcatatcttggcaatagaatataaatgttactcaaaaaagacaataaggactagcatctcttttgactagatgagttcaactgtcaaatggctcaggaaacagcgaaatctccaatggaccgtacaggcaaacacaagaaacttgaaaaagaaaaacagagaaaacaagaaaatcctccatgacaagatcatctgggagctgaaaagcaatttggatgtagtgcttcataacacaaaacataagctcctttaaagcagtgcaagtcccattaagtctttgtgatatttttgcatttcttcacacatgatttaaaattcacctatttccaaaaagatgtacaatgaaaaaagaagacaataaacaataaaaatagagataatttataaaagtacaacaaaggaagggaaagatatatgcaattaataattaaatatgagccacagtgagatacaaggaacactgactgagatggctataatttaaaaagaaaagaaaaaatggaaaataacaaatgttgcaagaatgtgaagaaattgtaacccttatacactgctgggggagtgtaacatggcacagccacagtggaaaacagttcaccagttcatcaataagttaaacatagaattatcatatgacgcaacaattccactccaaaggaaatgaaaacagggactccaccagatacttgtatgtctatgtctttgcagccttatttacaataaccaaaagatgtaaacagcccaaatgtccatcaacagatgaatccagaaataaaatgaggtttatatattccaacggaagatgaaaagggatgaaattctgacacatgctacaagatggatgaaccttgaaaacactttgctaagtgaaaatagccagacacaagaagacaaatactatacaattttacttaaagtatctagaataggcaaaactaatagaaaaataaagttaattagaggttaccaggggttgggagaagggaaaatgaggagttatggcttcatggttagacagtttttgtttkaggtgataaaaaaaagtttgggaatagtagtggtggttgcatatgttgtgaaggtaattaatgctgctgaattgtacactttaaaatgtttaaaatgataaattttatgtttataaaatgtaatatgtatatatgtgtgtatatatatacatatatatatatgtaaaaccacaataaaaaattaaattaaataccgctctaagcatcctgatgcccaaggcaaagcggggaaatgaggcttccatgctaacaagttcaaggctgctggctcttgtccccatgggctagataccctccarctgaggacagttctgataccaactgcrtcctagtcgcacaccagatctgcaaccctattcacaccctttggtcacaagttatagcgactgtgcatggctcagggcaaaccatttgccttcatgagaaagaaactcagagtgagggggtgtggcctccttgttgaggtcagttcattttaccccaaatatgtgaagtgggataatttgggaagcaaragtgaaagggacagatatgctctgggccttaccaggcgacagcacttttggtccattggaaggatggggtctggaagcccctggagcctcagattccaactacccactcctacccccatcttccctgtttaaaagttccatcaggcagaattgagctctctttggcaattccaattaatctggccaattccctcgaaatgtttgttcttgtccttctccattgcccttgcctgggtccttgttcctttcactccccgcttggatccgtggaaattgtcacccaaaaggtttcctcccttcaaagtaatcccagcactaactcatcatatagactgctggtaaaataatactcctgcacacacaaatgcaacaggaaaagtctggtggtgccgtcaagcagcctctctcaaactcccatcataatgtgccaacarccgggagggggaggtgtcactgcaatggagctgtcgacagttgctaaaacagccacacaccttgtgagacttgagtcactgttctattaggttggtgcaaaattaattgcggttttgcaaaaccacaattaatttggcaccaacctcgaatgttgtaatactctacaacaaaatgaaaatgtagtaattttcttaaaaataagtaaaattaggagtgattgtttcaactactggtatcaactatgatcatgaaatctctgccacccagcctaaacaattattcagcatcacctccacctaaataacattcaagtccctcttctgcaccactatgtctcattgttcctcactgcttgggggagctcaggcatctcaacctggctgtcaaaattcttccaaatctaactaaacaccatctagcttatccaaaccacatgtctgctttgcccacataaaactcgccgtatcacaaactaaggatgttcattttcaaattgcttaagcaattccctacctaaagtcctcagcgttgttcctcctccttttcaattcctactacccacgaacaacagctctcactccacctcctccaggaagcttcccctgactactctctcccattgatttttttccccataaatatgttgtttgaatggaatgctaagtgatgacctttcattggtcaccatcttttatcacgatggacctgttgagtgtagatttcttttgtccattgaattgtgccttctttatcctacctcatcatgattcttgtaggtcaggttcrctaggacacagacactgagacggggattggtatgcagggaatgtaggaagatttgggccaagggggaagctgaggcatgacagtttygacaaaagtcacagctaaccccactgggaagttgtgaagctgatcagacccttctgagcctcaagttggggctggggcctgggcctttatatgctgtgttgatcatgtctgagggctgctcctggaacaggcagcagccttgtgtgaggtgattccagaagaggctgtgtggtgaggtgaaggctgtttgtggaagctttcccagcagccgagaaggggagtgatacggtttgcctgtgtctccacccaaatctcaacttgaattgtatttyccagaaagggacccagggggaggtaattgaattatgggggccagtctttcccgtgctattttcatgatagtgaataagtctcatgagatcttatgggtttatcaggggtttgcacttttgcttcttcctcattttctcttgccgcygccatgtaagaagtgcttttcacctcctgccatgattctgaggcctccccagccatgtggaactgtaactccaattaaacctctttttcttcccagtctcgggtatgtctttatcagcagcttgaaaatggactaaaacagggagggagggacaactcagtccttcagtcctgaaagggggatcttggtgtcaactatgatggccttaaaaaaaagagaatgaaaggaaaggaggagaacggaggaagaagaggaaagacaggaaacatccatcacacttgtttgtcaggtcwtatktggaacagagtgtgccaaggcagtcactccctggaggagagaggcaagctgcaagaaggccatggggacaatgtgcagagcaatgaagcctcctgcccatagtgactgtacccgcgacctggtggtgaccaggcaggcatttgcacctgctgggctccagagctccccttctttcttcactcggtgacagcaaaccaagacttgggtcacatcatttctgggtaagtatgcrgagatgctgaaagaacagtgggagcaaaaagaacaagaatcttgaacgtcttctgttttctctatgacccttagaaacccaaagaaaatttcacagtaggaaaataatccattgcacaaactgtatttttaaaggtgagagctggccgggcgcggtggctcatgcctgtaatcctaccactttgagaggctgaggtgggtggatgacctgaggtcaggagttcaagactaccctagccaacatggcaaaaccccatctctactaaaaacacaaaaatcagccgggcatggtggcgcatgcctgtaatcccagctactcaggaggctgaggcaggagaatcacttgaacccaggaggcggaggttacagtgagctgagatcgcaccattgcactccagcctgggcaacaagagtggaaactctgtctcaaaagaaaaaaaaaaagtgaaaggtacgtttgcttagaggaaggggatccagagactggatttctgtaaagtccagaaaaaaagttcagattttgcaagataaaaaccatgtgcctggaatgtgctggaatcagaaattataaacatcaaagaaactctgaggaggaggcgtggtaaagactctctcctaccacccataggaaatcaaattccagcaaagacaaagatcagtacaggagaagaaagcctgggcrgagaaaacgagggaaccctgacggaacctgggcaactggaaagtattactccttcgaaattctgaagttcatttacagctgccagtcagcacaccagggaatcagaaaccaccagagcctttctctgcagctggagaatttgaattcatttcagaaacttcctggagacgaatgaaaggcaagggcttccagaaatcagaataccttctgccccagggtcttgggcagaattgccattttcatcacagcacgtgaagtaagatagtgagtgaggggtttttcttagaatctatacttaaactcatgcatttttcaaaatatttcatgcttttctctaaaaccttatagctatcattcactgacaagcaatgcatgggtaagatatttctttatggccctctattgtcatcctattaatctagacattaaacttataagtatcatcttgtcttrwtttatttttctaatctatacttttctcaatgatgtgtttcctaattgacatttccaaattacgagccttggggttcttttaatcattttggtttttaagcacttttttattttgcttctccgaagttagttagaaattgcaactactggttattccagggctgatggttcagttacaggctctggggctaaatcccctggtcctggctaccctgaacttcacgcagctctgagtaggggagtaaattagcctgcagggggaatgtgggtaattctcgacctcattacagccctcctttccaatttcgccttcctacgagcagcttaaaatgcagaagagatcagctgagacacacactctcctccacgtgctccctctccctccccacctgatcctgcttctatcccctcacccctcctgatgagggagggaggagagcacaacaggtggaaagatgagccagtgagaatttcaaacccagcggagtccccgcccatgggatgtgacctgtttgtacaggattcttgcagttattgggtggtctttattatcattgttgactctgggaaacttttcattcttgacccagagtcttcattagagatcttttcatgagaaaaagggcatttttaagagctgaggtttgaatgcatggaaatttttaaaaactacctttggtcatgtgaaaagaaagcagctggcaggtggtgggggaaggagcccatctgctaattaaaactccaagagtagtaggaggaacaactactctaaggcactatctttccccacgttcctgcaaacaaattagcttcaacacccacacacagtaggaaaacaaatgccaattatgcctcgatgtttccttgaacctgttttcttttccctgtctccaactgatccttaacactgctttgatagtgggctggagataagcccattgcttatctggagaaatgatttccacccacttttattctaaagcaaatccgcarcactgaggaggctgggaccaacatcaagcccagatccgtttccacacatagagcaaaactcttcattttggttgagtaccaacaatagtagtttataacataggaaaggagtgtgcctttaattattgtatttcagtgtaaaacataatcagaggttaaaacagttttatgaaggcagataacattatggcatatattaatgtatagaggatgcrcatccatttatttccaactgcagatataatggggtacctgactgggactagatcaaatgattttggctttattcttggttgcttcccagttttggcaagtacgcaattatgaataaatatgctacaaacaacgatgtgcaggattttttgtgtatataactttattttctccatatgattttctaaaatcytggtggagacaagcagtgggtgaggaagaaagatggctaaagttgcaggcactttttcagtttctytggaggcagaggtctgaatttcacctgtgatgtcaagcaatttctttgtctaagccttttggtaatgccaaagtaaagcagcaatcccttctggaacagagaggtttaggagcaacaaggagggaaacagggctgcttggccccataaaagagcatttccctatatgtggcaggcttctctgttcatcacattccctttaggggaaaaaaatttctctaaatgtggatttagactatccctaaaaaaattttgcttgtttcccagaggggtgtgtgtgtgtgcatgtgtgttggtgtgtgcacaccgactttcttgttcaggaactcacccgtctgtgtggttaggagcagaatgaagctatgaagggagcaggaaggatgaggtggcatgtcttcatgacatgctctcttttttaaacttcacaccaggtatcctggcagatttaataactctgacctcaggaaagttccctcttttgggggttttgcactgtttaggtgaggagaaggactaaggcaaggccttagaaggatcctttgtttctgatgggagtagacattctgggtaccagataccctggagatgggctggaatgtgaggtctgaggagttgagtctcaaacttgaaggtggagagaaatcctcaaggacctttgtgttgagatgtttaacccttccaatattggtcatttggaacagccatatccagtgtctggcggttttctctgattccttgtgaaaaacattgattatcacatagagcactaaggcaagggctgtgccagtgctgcagacctttctctgggaaaccacaggagggaaacctggcaggactaacacttcctggttgaacgggatgtttaagagaggaaatgcctgctagagacatctgaattatctagatcaatggttctcaactgggttgattctgctcccaggagataactggtggggtcrgtggtggctactggcatccagggagtaaagaacaaagaagctgctaaacatcctaccacatacttgatagcacccaccccacccccaacaaagaattattcagcccaaaatctcsatagtgcttaggttgagaatccctgactcaggaggagttagtgaaaacatttagatgttcatatgtaaatacaataaaagctgaatctcaaaagtaggaataatgttgatctaaaaagaaawgtttacctggcgaaagacaacacaagggatatttattgagagtctaatatgcgccaagttttrttccggtttctagcaaccaacaagacaacttctcattctcatagaattgatgttctggttgggagggaagacctctaaaatatcatatatatttcagatcataattacaataagagcccccttgtgaattgtttcatttagtcctcccaacaaccctatgagatttgtgctattataatctccattttagaagacactgaggcagaggtaagtggcttgtccaaggtccacaacagatagactccgtctggcttcttcagagcatttaaagttcctcttatggtcaacggactttagagcttaactagctacatgatgtggggggtatgacttaatttctcttgattcttccttcatgtgtggcatggaggtaataaaagtatctcataagattgtgtaaaaactgagtattttgatttatagagagtgcttagaacagtgtttggcatacagtgagagcttataagttatataagaaaatggaaagtaggtagagaatgactgagaatcctactttacacccgtggttcccaaagcatggtccctggatcagcaggaccagcatcccctgggtacttgttagaaatgcaaattcttggcccctagcccatgtaacaagaaaaacccagaatcatacagaaaaaccatctcccaagctgggaggaagcacagagaccaaaaagtgactcaaacaagtacagcttggtgagtagatgagtttattagagcttgcatacaaggcattctggggcagcagcagggcagctctagagatgtgtgccctctcccatctctaagctgttttaagctaattttctggctctttgcctactgtgtgtgtgtgtgatgggactgttttccttagtagggtctcagatactccctgggatgtttgagttatcagggacatctgctcctcagtggggcaccatggccttggctcatcacctctagggttccggcagcagacacatacctttaagtaatctgatgggggactcatcacattacagcccagacatgactctggggtggccccagcaatctgctttaacaagcttcccaggtgactttgatgtcagctgaagtttgagaacccgtgaattaggccattctgaggaggtgatgtttggactgtgataaaggagtttgtcttgaccctgccctaatgccttccctgactacaaacctttaaaaagaaccaaaactctgtatatgtcctcccttctcttgtgctatttaattctacttggctttaggcttagatagcttcttctcggcttctaagaccagatgtcttccttgatatccttaaacaccctcaactgttctccatcctcagtaagctggttcttggttctcttcatatctttcctcattcattcattcatgtgagtttattaagcctaatccaggccttgggtgaggtggaagtggggtgcatggcagggaaagctgagagacacttggtgcccagccatatcctcggggagcctgccagggaaagctgagagacgcttggtgcccagccatatcctcggggaacctgccagggaaagctgagagacgcttggtgcccagccatatcctcggggagcctgccatctagtagagaggcagaagtgcatccctgtgtcagcactcgcttctggggccagtcacagcaggggcaccagctaggactgggactggggcagatgtagggatcaagaccaccttctcgaaagcggtaaygcttgatctgagactcaatgagcaaatagaaataaaaaagccccgataaaacaatattaaaaatcatctggaagaacacacaagggaaataatattgaagaatgaatgttttttaataacagcaaaaaaggtaactatgggagatacatggaattactacaggcaaggaatcagctgagtgaaaatgatagaaatgttctacgtatactttctttaaaatcaaaaattgacaagcctgaagtgaatgaacagccatctagtcaacattgggtactcactgattattcttatggttttgttttgttgttgttcttttgcctccaggcatttgctcaccctcctctcgccaagtattcctccatcctcttctccccacacttgctggtgaaaatcttcctcatatttaaggttcagatcaaaagctgcctccctcggaggacttctctgatcctcctcattggaggtgatttctatccccagcaaggccagaaacccttgttggtgctgctaatcaactgttagcacattttgctgcgtcgtggttattcggtaagcagattttattctgtgatagatgaaagagcctctgagatcaggaaagcatcacacctatctttgtacgaccaagatgtcttgccctcagtaatcagtcccttccctagataagattatatacaacatgcaggtaagaggsccgagccaccacctcctgctacattcaacaaccaccacagggggatcaaagaattacacttttaatctagtcataaactttaataacacaaatggaggacaggaaagtgatttatgattactgagtaagttgaagatattaatggagacaagaattaatgtgttttattacataaaaaatttattcgacaaaatgtaataaacacgaagagtaatagagaaaaattacrtgacaaaaaactgattaaaatatgctctctaaatgcattaaagttgataaatattcataaaatcaacacccatattcctttatagagtagtttaaagtgaataaacagcttttatgcaagaatacatagataataaacaccatatggaaatatgcagcagttttagcaattaaaaatgcaaatcaagctggacatggtggctcatgcctgtaatcctagcacttcaggaggctgaggtagatggatcacctgaggtcaggactttgagaccagcctggacaatgtggcaaaacaccgtctttactaaaaataaaaacatcagccagatgtgctggtgtgcgcctgtaatcctagctacttgggaggctgaggcaggagaatcgcttgaacccagggggcagagattgcagtgagccaagatctcgccattgcgctccagcttgggcaataagagtgaaactctgtctcaaaaaaaaaaaaaaaagcaaaaagcaaatcaaaacaattaaaatacatcattatacaccaattgaacattgtttttaatgataaaaaatttgctttagcaaggctgttcgtttctttcttgtttctccaaagccagggctaagaaaactgacaccattaaatttttctgaggtacaatttgaaaatgcataaaaagaacrgttacaccattcctatattttaactccataattaaatttgggagaaaatgtatcaagaaaataaacccaggcagagcacctgtaatcccagcactttgggaggactaggtaggcggatcacttgaggtcaggagtttgagagcagcctggacaacatggtaaaaccccatctccactaaaaatacaaatattagcccaacgtggtggtgcatggctgtaatcccagctatttgggtgattcaggcaggagaatcacttgaacccaggaagtggaggttgcagtgagccaagaagacgccactgcactccagcctgggtgacagagggagactccatctcagaaaaaaaaaaaagaaagaaagaaaagagaaaagaaacccaaaagagaaaaaaagtgctaattgtaatttttaaaaatcagtaaactgaatgcctgtcatgtactgtgcagggttgagattttaccctacttgcaagctcacaagccaccctgttacaatttcatagatgctggcagaagacattagactcctgagtcagagaaaacaaactttaatacactaggcaaaagccatagccagagcttcacctttgcttgtgatagctctccatgtttcccagttctcatgcgggtgatagaaagggctcatgctgaattcctgcccagtagtgagcagagtcacagagagaaatgctgagcttggaattcaccactttgacattaagtggaagcaagcatgccccttgcccagaggagaggttacttcatcttttaaggttgcttgctacaaacacaacactcaggaatggcctaggaaatgagcagtcagggccttgcattcttggcacacacgaggagaaggttcaggggatgctcagggcctatgaaccacgtctcccaacaatgcctcatttatttatttaactcattccaatgtattgagtcaactactatgtgcccggcacagaataagatgctaaggatattgcagtgaacaaattccctgcccaagaagagcttatattttagtgggggaaggcatttagataatggaaagggaattaaataataatatgatgtcacttctgtgaagagctatgaaaagagagtggtaggatagaggggtgggaaatgggggtcagatagtggagtcccagctatcagtctcaaagcaagtgtcttggtctgctcagactgctataacaaacaccttagactggctgccttagacaacagaaatttatttcttacagtttaaggggctgggaagtccaagatcaagttaccagcagattcatttcctagtgggtaccctcttcctggcttgtgggcagaatccttttcactgtgtcttcatatgttaaggagagacagagtgaggtctctggtgcctcttataaggacactaattctatcaaaccagggtattacctctttgtaggccctctctccccatacaggcacactgagagttagggcttaaatatatgaatttggggcaacacaattatgtccatagcagaaagtcaacaaatctctcttcatttcttcttctgcaaatgagaatgatgcctaaaatgactgtgggtaagatcaactgaaataaagtggtgaaagtgttttgttgttacaaatattttagagaatatacctatctaaaaacataatctacctcaaagatcagaagataactgaatctaaggtttagactagaagttagaaagagcaggaacagtcattatttattgaacacttactcctgtgctactggctctaactctagttttataatgatctcatgacaagtataattatccccacttttaagataaggaaaatgtgtctcagaaagcctaagttgctcagagtctcccagctgataaatggtaccctataacaagtggaactatgaagacaatatataataacatgaaaagtgctaacagaaatctgtaaataaaaaattgattttacctatagaaaatgtacgtggaggtgggtgcggtggctcacgcctgtaattccaactctttgggaggccgaggcaggcagatcacgaggtcaggagatcgagaccatcctggcgaacactgtgaaaccccgtctctactaaaaatacaaaaaatyagccgggcgtsgtggcaggtgcctgtagtcccagctaatcaggaggctgaggcaggagaatggcgtgaccccggcaggtggagcttgcagtgagctgagatcgcgccactgcactccagcctgggtgacagagcgagactccatctcaaaaaaaaaaaaaaatgtatgtggatagggacaaaagatgasagtaaaagcatgtgatgcatctggctagtgcaatatgaatgttttaacatttctaatattctttgctcttataatgttttcaataawatggagagatattgtaaaaatatttcaaaggctagtcttccttttcttctaacaaattctcttcatcaggtcaattttctcaaaatcttctcaattccagctttctccatgttggaaactgaaaggacagggctgggtggagagtgcgcgtatgtggggggtgaggacatgataggggaggttagagctggcgaagatgatgktataaagggttcctcttccagatctctgccagattgctcagaagccgcgttctttcctcatagagccagggagtgaatttctcaaggcgtcaccaagccctcgccgggcagcmgtgctggaagcaaagcggcggcaggatggggctgggcttaggagctttctgttttatataccccaatacctgggtttcccatttcgggtataggtagaatcgagattacaggaaacccgaagccccctggccggggcagagcgggacccttgtttcccagtgtcaaaccgtgccaccagcaggtccgaggggtccgcagaggtggtggcaagggactttctccccattgtaaacctttcccggagaccacctcagttagggttgtctctgcttggcacagtcagggagaccagcggggacagtgttgaaggcctggctcctgttggtgggctctccagctaccccgggttgtctctgcttggcacagtcagggagaccagcggggacagtgttgaaggcctggctcctgttggtgggctctccagctgccccttgctcccgcccacccccgcccactgcaggtgcagctcgtctcccgacgccgctgggtgggggaggggcaactctccaagcacaacccgcgctckgtccctcggccgcgctgattcccaaccccctggcggccggtggcacccgggaccgctaagagaggtggtaggagggactggcgagccgagcggagctagactgaggggtcctgctctctcttactcattctcctggaaaagaggatctacgggggctgcaggcatacgtgccaaaggtgggctgctgcccgcaggagggatcaggataggacgacctggacccctcttccagcctccccyggcaggcagtacccmctccacgcccgcacctgcccggtccacgccgaactcactgaggactcgtgtgccccctgccctggagctgcgatcccaagcgccrtggaggccgctagcctttcagtggccaccgccggcgttgcccttgccctgggacccgagaccagcagcaggacccgggaccccaagcccgagagggrtactcggttcgaccccgagcggcgccgtcctgcsgggccgagggccgcccttctctgtcttcacggtcctggtggtgacgctgctagtgctgctgatcgcygccactttcctgtggaacctgctggttccggtcaccatcccgcgggtccgtgccttccaccgcgtgccgcataacttggtggcctcgacggccgtctcggacgaactagtggcagcgctggcgatgccaccgagcctggcgagtgagctgtcgaccgggcgacgtcggctgctgggccggagcctgtgccacgtgtrgatctccytcgacgccggagcctgtgccacgtgtggatctccttccacggctgtgctgccccgccggcctcgggaacgtggcggccatcgccctgggccgcgacggggccatcacacsgcacctgcagcacacgctgcgcaccygcagccgcgcctcgttgctcatgatcgckctcrcccgggtgcygtcggcgctcatcgccctcgcgccgctgctctttggccggggcgaggtgtgcgacgctcggctccagcgctgccaggtgagccgggaaccctcctatgccgccttctccacccgcggcgccttccacctgccgcttggcgtggtgcmgtttgtctaccggaagatctacgaggcggccaagtttcgtttcggccgccgccrgagagctgtgctgccgttgccggccaccatgcaggtgaggggtgggctgaggaacgttgctwtggggaagcggttgctagagaaggaggcrgcttcgcgaatgggagagtgggcggaagcttgtactaatggagcgcgcgcccagagatcacctggggcgcacgaggacaagtttgccatcagttcttctgaagcgggcaccgaggggcttgtcaccggctcacctggcacgcaagtgaggggttcgccagctgcgtacttggtgcgcgcagaggaaagggtttcacaatctgcacgttagggaggcagatctgacaccgacccacgacgcacgatatggccggaggggcttgtaggttcagcccgtctcagtagcgatgagggcacatcttgttacctgcactatctgttgttttccccctcaagkgcccctgtccatgtgagtcctggagccgccggcttccttgtcccaactagacctagaggggatgcagtggactgggaattcgtctttcagaaattcctgtgaccaatcacgccttattttctgtctccaccgtaccccagtctatcctctgcagttcagagactattccccaactccattagccagcaccctgccaaggggaatagtgaggattttaaaatataataattggtgtcactttgctttccttatctcaaccccggagctatcctctagtgatttaggaaagagaaccatggattcaaatcccagcttgggacattaggacagttgcttaatatctgtgggtctcatttcttcatctttaaacatgttcattcgtaattgatagggctcttggtgaggattacgtgagatgaagaatgtaaagcacctggcatagtggctggcacacactgggtggcagactggctggagaaagaaggggttcaacaggatattgccyggcagtccataaggaggaggaagataatgctggaaatgtaatgagatgagcaaaattgcagtcggcagatcttctctcaccgtatttattattctgtctgaagctttctgccttttggccaggatctaataggtgctcagcatccttctcactctggaagcctcaactttctcttttgagggtatcaggtgtttcaagtaacatgctccyggtcctatagattaacaggatttattgccctttgcaaatacaatacatgggtgagggaagaggtgcatatgagagcaaaaagagacaaggaaagttttttgttgctagttttgttttaattttggaaaattaactcagatacttagaatacaggacaaatacatgtgatttttaaagtaggccttttttcttctacattaaatggcagaggaattttgcagcataaaataggaatgtcaagactataactggaagtgttggtgagggagagttttattcagaattaatgatgttctttgaaaggtcccttggaaatgcctggggtgattatagcttttctgtctgattgccgagctagggctgacttttaatagctacgtcaatccaatgcgcacttagagaaatcacggtgaaatggatgccggaaaaccttgccaagcctgattttagtgttcatttttgacagttcccattcaggcaggtgacacagggaagaggtgcctggatgagaggctggccaatctggagtgtccattggtggatagagagagctctgagaggaagaggaactgttaaaaatttagccactcccggcaggaggacctggggcaagcccttccccactttgggcctcaacttctctaacatacagtattcttctaagtcatgtctaagggccttgaatcacaggatgctgagattgtagatggggtagtgttcaggagcatgctgcttctaygggtcacagcaagccctcactcaaacttctgggtaatgttcctgagtccacgtttgcaagccttctggaaacaagacatctaaacaaaagtgtaaaacaccgcgccaggaatacttcctctctactttcccccacctgcatcattctacwctccaggcgaaatgagttgtattgtgtttaggctctgcaaagtgtctgtactgttttctgcagggaacaggagcctatgtgaagcctgaaggcctctgttgatgaggctgtgtaagaccttcatctttttcagaattccgtgtctaggtcccaacactaacatattataagacaggggtcttatcagaatgtagtttttgggcaatgattaatcctttggggcaaaatgcagtttttcaaagttgagaagggaaaaaaatgtttattgagtgaattgtctcttccagacacatttctgatgctttacattcaccctttcatttcattctcacaattcagtaaagttggcattaagtctctattagtcaggataagctaaggcatgctgtggtaacatgtaaccccaaaccagaagtttatttcactctgacttaaagttcaatgtgggtctgcatacctgcacagctctcttccaggcagtctctcatgattttgggccatttatcatttttagctatgctgccttgcacatgtgccttccagatttattgtgggagaagagctatgtatggagatatgccagctttttactgccttaccctgaactggaagcatgtcatcactatttgcagcccattggccagccattggcagtgaattggaagggagcatgtagctatctggtgagcactgtctttgccataaggccctcattttacagatgagaaaactgcaagagaaaactatggtaaggcaccacaaacctagttcatccaaaaccacgcagttmctgggtagagagtctgaaggttgtaccagatctaagaatcactatttttggccaggtgcggtggctcatgcctgtaatcccagcactttgagaggcggaggcaggcggatcacgaggtcaagaaatcgagaccatcctggccaacatggtgaaaccccatctctactaaaaatacaaaaattagctgggtgtggtggcacaygcctgtagtcccagctactctggaggctgaggcaggagaattgcttgaacccaggaggtggaggttacggtgatgcgagatcgtgccactgcattccagcctgatgacagagcgagactccgactcaaaaaagaaaaaagaaatcactgttttcattactccatgccatctccagggacttgacttctgaggyctgcccctctgctcatgggtgtctctgcttgagaggaatgaggcagtcacagccsagtcaaggtgggtcccacgaagcaggatctcaaaactactcaggtgaactctccttttcaggagagctgaacacaattgagcacaaaagccttgcctgcttccctcaggggacaggtttaattcctgccctggtgtcttttctttcaacatcttaaactgagactctgagcatcccatgtacactataatctgctccccaccccaaagcaagccccatgggttacgattacttcctactgccctgtgcccttcactgtttagaaaagaagaaacattatttctttggcttttaaaatgtgacattaaaagggttttttttttttttcctatctctctctcttttctttgctattgcttgtttgatttctgtgtgcaatttgatgctgggacctagttatccatcaggygtagtagtcatactacttaraaccagaattcttttagggacccatagaaatattttaattttaatttcttttaaaattagaggaaaaatgaatataacactaatgaatatattataatgaatccagtcttgcttatacttgcttatactaatgtttaacataattttcagtatttcttaatgaaggaagggatacattaaggcaaagatgtctagggaccacacaaattataatgaagccttggttaatatcttgccctcattcttttttttaatcgtactattgctttctttttaaaatttttaaatatattttttaatagctttggggctacaagtggtttttgtttacatggatgaattatatagtggttaattctgagactttagtgcaattgtcaccagactagtgtccccttctaagtctccaaagtccattatatcactctgtgtgccttcccatatattcatagcttagctcccacttataagtgagaacacatggtatttggttttccattcctgagttacttctctcagaataatggcctctagcttcatccaagttgctgccaaagacattattttattccttcttatggccaagtagtattccattatgtatatataccacattttctttatctactcattcgtcaatgggcacttaggttggttccaaatcttggcaattgtgaattgggttcttgcactcattcttaataaatatatattgggagataatgtacacagtggttaagagcatgggacttggaaacaaagaaacgtgggtttcaatttttttgactgccacttattagcacttcagccaagtgacttaatctacatctgcaattctgcatatgtaaaatggaaatattaccacgtgtcttttaatattcttgtgaagagcaaatgaaattctatcatatgtggagtcccttaagtagtaaaccataaataatagctaccgcattacttttgttatttttctayttctctttaataagaaaagtattattttatttctcttattgctattcctcataatcataggtagattatttattgcttgtgtagaaaattatcccacagtttagtggcttaaaagaacaaacatgtattaattcacagtttctgtgggttgggcattcagaatggcttagctgggtggttctgacttgacatctcttttggctgtaggcaagatgttgcatggggctgcagtcattcaaaagcttgactgaggctggaaactttgcttccaagatggagcactcacatgcctgttgacaagaggcttcagatccttgagaaaaggacatctccaaagggctgcttgggtggtaccacatgakagctgactttccccagagcaagccgtccaagagagtgaagcaaggaggaaattgcagtgccttttatgacttagtctcagaagtcacatatgattattttctattcattagcagtgagtcactaagtccagctcacactcaagaaaagaggaattaggcttcatcttygggagaagtatttcccaaaacatattgaatgtagtgttcaaaattactcgattgacttactgatcttatgtaccaggcaatgtcctctgaggtttcaaagaatgaataagcactttcctgctcccagtggatttttagtagattataattatagaattataaatgcaataaagtcttataagtgctctgctagaaatctgtccaaagtacaatggtatctgaaagatttaatagtgtatgggaaagcactatgtaaactgtgaagggcaaagtaaatgtgaggtattgagctttagggtttatggcaacttggaacatagattttagattatgctgtattacaaaaatttgactttctaagccagtcctctttgttgacgttttgtttgaacaatgacacactgccataaaggttatgtgcagtaggccccaagtgacccaaaatctgtacagagccatttatgtttatatatttattttamattgacaaataataattgtatatacttatgggatacaatctaatttttaaaaattttgtatttttaawttttgtgggtatacagtagatttatatttttatagggcacatgagatattttgatacaggcatgcaatgtataataatcacatcaaggtaaatgggctatccatcacttcaaacatttatccttttttatgttacaaacaatccaggccaggtgtggtggctcacgcctgtaatcccagcactttgggaggccgaggtggccggatcacgaggtcaagagatkgagaccatcctggtcaacatggtaaaaccccatctctactaaaaatacaaaaattagctgggtgtggtgatgggcgcctatagttccagctacttgggaggctgaggcaggataattgcttgaacctgggaaggcagaggttgcagtgagctgagattgtgccactgcactccagcctggcaacagagtgagactctgtctcaaaaaaaaaaatacaattatactattttagttatttttaaatgtacaataaattatgtttgactatattcaccctattgtactatcaaatactagatcrtattcattctatctaactgtatttttgtacccatgaacccttccctcttaccccctcccactacccttcctagcttctggtaactatcattcaactctctatctccatgagttcaactgtttaaatttttagctcccacaaataagtgagaacatgtgaagtgtgtctttctgtgcctggtttatttcacttaacataatgacttcctgtcccatccatgctgttatgatgggatatcattgtttatatgtatgtaccacattttctttatccttcatctatgaatggccacttaggttgtttccaaatcttggctattgtgactagcactgcartaaacatgggagtgcagatatctcttctatatactgatttcctctcttttagatacacagctggcagtgagattgctgagtgatatggcagctctatttttagtgttttgaagacccttcaaacagttctccatggtgtctgtactaagttacattctcaccaacagtgtacaagggtgcccttttctccacttcgtcaccagcacttgtaattacctatcttttggatacaagccatcttaactagggtgaaatgatatcttattgtagttttgatttgcatttctctgatgagcagtgatgttgagcacattttagtacacctgtttgctatttgtctttttttgagaagtgtctrttcaaatcttttactcactttttaatcaaattatttgattttttcatakagaattatttgaatcccttatatattctggttattgaatcccttatatattctggttattaatcccttgacagatggatggttcacaaatattttcttccattctatgggttgtctctttgttgattgtttcctttgctgtgcagaatctttttaacytgatgtgatcctacttgtccatttttgctttggttgcctgtacttgtggggtattactyaagaaacctttgccaaatccagtgttctaaagagcttccccaatattttcttgtaggagtttcatagtttgaggtcttagatttaagtctttaatccatgtttaattgatttttacatgtgacaagaagcaggtgtctagtttcattcttctgcatacagatattcagttttcctagcaccatttattgaagagactgtcctttccccagtgtatgttctttgaacctttgtcaaaaatgagtttgctgtagatgtatggatttttttctgggttctctattttgttctattggtctttgtgtctgttttatgacagttccatgctgtttgggttactatagctttgtagcacagtttgaagtccggtaatataattcctccagttttgttgtttttgctcaggacagcttaggctactctgggtcttttgtgtttttatataaattttaggattgttttttctatttctgtgaagaatgttattggtattttcatagggcttgcattgaatctgtagattgctttaggtagtgtgaacattttaataagatttattcttccaatcaatgaacatggaatacctttccactatattgtatcatcttcaatttcttttttttttttttttgagacagagtctcaccctgttgcccaggctggagtgcagtggcgtgatctcggctcactgcaacctctgcctcctgggttcaggtgattctcctgcctcagcctctcaggtagctgggattacttgttatcttcaatttctttcatcagccttttatagtttttattctagagatcttttacttctttaattcctaggtatttaatttatatgtaactaytgtaagtggaattactttttaaatttgttttttcagattatttgccattgaaatatagaaatgctactgatttttgtatgctgattttgtatcttgcaactttactgaatttgttttttagttccaatggtttttcagtggaatcttcaattttttccaaatctgcaagtaatgacaatgtaattggacttcttcctttccaatttgtatgctctttatttctttctcttgtctgattgctctagctaggacttcccatactatgttgaataacagcggtgacagtgtctttgtcatggacaatgtccatgtcatgatccagtgtccttgtcatggacaatgtccttgtcatgttccagatcctagaggaaagagtttcagttttttcccattcaatatgatagcggcaatgtttctgtcttttatggcttttattgtgtcgagatatgttttttctatacctaatttttaaagggtttttatcatgaagacatgttgaattttatcaaatgctttttcaatatcaattgaaaagatgatatggtttttgtccttcattctgttgatacgatgtgtcacattgactgatttgcacatgttgagccattctcgcatcctgggataaatcgcgcttggtcatgatgaatgatatctttaatgtgttattgaatttgatttgctagtattttgttgaggatttttgcatcaacatttatcagggatattggcctatagttttttgtttgtttgttttaatgtgtgtttgtctggttttggtatcaagataatactgcccaccatataatgagtttggaaatattccttcctcctctatttttcagaatagttaaagtaggtttggtattagttcttcttttaatgctcggtaaaatccagcaaagaaaccattgggtcctgggcttttctttgctgggagactttttattatggctttggtcttgttacttgttattgatctgttcaagttttggattcttcatggttcaaccatggtagaaggctatccatttcttctaggctttccaatttattcgcatgtagttgctcatagtagcctctaataatcctttgaatttctgtgctctcggttgtaatgcctcctttttcatctctgatcttatttatttgggtctcctctcttttttccttaatctggtaaaggtttgctggctttgtttatattttcaaaagattaactcttaatttccttgatgtttttattgttttcttcatttcaatttcatttatttctggttagatctttattgtttattatcttctaattttgagttgggtttgcacttttctggttctttaaaatgcatcattagggctttttgtgagtttttttttttgatgtaggcaattatagctataaatttttcctcttaatactgctttcactgtgttccataggttttggtatgttgtgtttccattatcatttgttaaataattttttttttccagacagagtctcactctttcgctaggctggagcacagtggcaagatcttggctcactgcaacctccacctcccgggttcaagcaattcccccgcttcagccttccgagtagctgggattacaggcacatgccaccatgcccagctaatttttgtacttttagtagagacggggtttcaccatgttggcctgaatggtctcgatctcttgacctcgtaatctgcctgcctcagcctcccaacatgctgggattacaggcgttagccaccacgtccagcctatacatttttgaattccttcctaatttcttcattgacccactggtcattcgggagcatattgtttaatttccatgtgtttgcatagtttccaaaattcctctcgttattgattcctagttttcttccattatggtcagagaagatacgtaacataatttcattttttaaaaattaattaacacttgttttgtggcctaacatattgtttatccatgataatgatccatgtactgaggagaaaaatgtatattctgcaaccrttaggtgaaatgttctgtaaatatctattaggtccattaggtctatagcacaggttaagtccaaagttggtttgttgattttctgtctggataatttgtccaataatgaaagtagaatgttgaaatcttcagctaatactgtattgtggtctatctttttagcgctaaaagtatctgctttatatatctgagtggtccaatgttggsagcatatatatttataattgttatatcttcttgctgaattgacccctttatttatataataaccttttttgtctcttttatagtttttgtcttgaaatctatttagttacatataagtatagctctcctttttacttttttccttttttttttttttttttttttttttgagattgagtctcaccctatcacccaggctggagtgcaatggtgcgatctcagctcactgcaacttccacctcctggattcaatcgattctcctgcctcagcctcctgagtagctgggatttggcatgtgccacctcrcccggctaattttctgtatctttagtagagacgtggtttcaccatattggccaggctggtctcaaactcctgacctcctgatcctcccacctcggtttcccaaagtgctgggattacaggtatgagccactgtgcgcggcttcctcctccactgccgccgctgcctcctccgctgccaccgcctcctcctcctccccctctcctcctccccctcctccccctccctctccccgccgccgccgccgccgccgcctcctcctcctcctcctcctcctcctcctcctcctcctcctcctcctcctccaccgcctcctcctccacctcctcctggtttccatttgcatggaatatctttttccatctctttatgtttacatgcatctttatagatgaagtgtattttttgtgggaaatagattgttgggtcttgtggctttttttttcttttatatttatttatttgtttatttttcttattttattattattatactttaagttttagggtacatgtgcacaatgtgcaggtttgttacatatgtatatgtgtgccatgttggtgtgctgcacccattaactcgtcatttagcattaggtatatctcctaaggctatccctccccccttcccccacccacaacagtccccggagtgtgatgttccccttcctgtgtccatgtgttctcattgttcagttcccacctatgagtaagaacatgtggtgtttggttttttgtccttgggatagtttcctgagaatgatggtttccagcttcatccatgtccctacaaaggacatgaagtcatcattttttatggctgcatagtattccatggtgtatctgtgccacattttcttaatccagtctatcgttgttggacatttggcttggttccaagtctttgctattgtgaatagtgctgcaataaacatacatgtgcatgtgtctttatagcagcatgatttataatcctttgggtatatacccagtaaagggatggctgggtcaaatggtatttctagttctagatcccggaggaatcgccacactgacttccacaatggttgaactagtttacagtcccaccaacagtgtaaaagtgttcttatttctccacatcctctccagcacctgtcgtttcctgacattttaatgatcaccattctaactggtgtgagatggtatctcattgtggttttgatttgcatttctctgatggccagtgatgatgagcattttttcatgtgttttttggctgcataaatgtattcttttgagaagtgtctgtccatatcctttgcccactttttggtggggttgtttgtttttttcttgtaaatttgtttgagttcattgtagattctggatattagccctttgtcagatgagtaggttgcgaaaattttctcccattttgtaggttgcctgttcactctgatggtagtttcttttgctgtgcagaagctctttagtttaatgagatcccatttgtcaattttggcttttgttgccattgcttttggtgttttagacatgaagtcyttgcccatgcctatgtcctgaatggtawtgcctaggttttcttctagggtttttatggttttaggtctaacatgtaagtctttaatccatcttgaattaatttttgtataaggtgtaaggaagggatccagtttcaactttctacatatggctagccagttttcccagcaccatttattaaatagggaawcctttccccatttcttgtttttgtcaggtttctcaaagatcagatggttgtagatatgtggcattatttctgagggctccgttctgttccattgatctatatctctgttttggtaccagtaccatgctgtattggttactgtagccttgtagtatagtttgaagtcaggtagcgtgatgcctccggctttgttcttttggcttaggattaacttggcgatgcaggctcttttttggttccatatgaactttaaagtagtttttcccaattctgtgaagaaagtcattgatagcttgatggggatggcattgaatctataaattaccttgggcagttatggccattttcacgatattgattcttcctacccatgagcatggaatgttcttccatttgtttgtatcctcttttatttcattgagcagtggtttatagttctccttgtagaggtccttcacgtcccttgtaagttggattcctaggtattttattctctttgaagcaattgtgaatgggagttcactcatgatttggctctctattcgtctgttattggtgtataggaatgcttgtgatttttgtacattgattttgtatcctgagactttgctgaagttgcttaccagcttaaggagattttgggctgagacgatggggttttctagatatacaattcatgtcatctccaaacggggacaatttgacttcctcttttcctaattgaataccctttatttccttctcctgcctaattgccctggccagaacttccaacactatgttgaataggagtggtgagagagggcatccctgtcttgtgccagttttcaaaaggaatgcttccagtttttgcccattcagtatgatattggctgtgggtttgtcatagatagctcttattattttgagatacatcccatcaatacctaattgattgagagtttttagcataaagggttgttgaattttgtcaaaggccttttctgcatctattgagaaaatcatgtggtttttgtctttggttctgtttatatgctggattacatttattgatttgcatatgttgaaccagccttgcatcccagggatgaagcccacttgatcatggtgaagctttttgatgtgctgctggatttggtttgccagtattttattgaggatttttgcatcaatgttcatcaaggatattggtcaaaaattctcttttttggttgtgtctctgcccggatttggtatcaggatgatgctggccttataaaatgagttaggtagggaggattccctctttttctattgattggaataatttcagaaggaatggtaccagctcctccttgtacctctggtagaattcagctgtgaatccatctggtcctggactttttttggttggtaagctattgattattgccacaatttcagagcgtgttattggtctattcggagattcagcttcttcctggtttagtcttgggagggtgtatgtgtcgaggaatttatccatttcttctagattttctagtttatttgcatagaggtgtttgtagtattctctkatggtagtttgatggtagtttttatttctgtgggatcagtggtgatgtcccctttatcatttttaattgcgtctatttgattcttctctcttttcttctttattagtcttgctagcggtctatcgatttttttgatcttttcaaaaaaccagctcctggattcattaattttttgaagggttttttgtgtctctatttccttcagttctgctctgattttagttatttcttgccttctgctagcttttgaatgtgtttgcacttgcttttctagttcttttaattgtgatgttaggttgtcaattttggatctttcctgctttctgttgtgggcatttagtgctataaatttccctctacacactgctttgaatgtgtcccagagattctggtatgttgtgtctttgttctcgttggtttcaaagaacatctttatttctgccgtcatttcgttatgtacccagtagtcattyaggagcagtttgttcagtttccatgtagttgagtggttttgagtgagtttcttagtcctgagttttagtttgaatgcactgtggtctgagagacagtttgttataatttctgttcttttacatttgctgaggagagctttacttccaactatgtggtcaattttggaataggtgtggtgtggtgctgaaaaaaatgtatattctgttgatttggggcagagagttctgtagatgtctattaggtcagcttggtgcagagctcagttcaattcctgggtatccttgttaactttctgtctcgttgatctgtctaatgttgacaatggggtgttaaagtctcccattattattgtgtgggagtctaagtctctttgtaggtcactcaggacttgctttatgaatctgkgtgctcctgtattgggtgcatatatatttaggatagttagctcttcttgttgaattgatccctttaccattatgtaatggccttctttgtctcttttgatctttgttggtttaaagtctcrtttatcagagactaggattgcaacccctgcctttttttgttttccatttttttggtagatcttcctccatccttttattttgagcctatatgtgtctctgcatgtgagatgtcttgtggctttttaaaaatcattcagccactcaatctcttttgattgtaaagttttgtttatttacattcaatgttattactataagtgaagacttacttctgtcattttgttacttgttttctggttgttttgtcgtcttttttccttccttctggtcttccttttagtgaaggtgatatgttttaatttcttgctttttattttttgtgtatgtgttgtgtgttcttttacttgaggttaccatgaggcttgcaaataatatcttataacccaatactttaaactgatgacaacactggttgcataagcaaacaaataagcaaaaagaaaatgaataaaaactctatactttaactttcctcccctgctttttaactttttgttgtttctatttatattgtgtggtactatgtcttgtaaagttgtcatagttattttttttttggtttctgttttagtctttctgctcaagattgagtagtttatacaccacaattacagtgttataatattcagtgcttttctatgtacttacagttaccagtgaattttgtacctttgggtgatttcttactgctttttaacctacctacctaccttcctgcctttcttttcttttctttctttcttttctctttttttttttttttttttttgagttggagtcttgttctatcacccaagctggagtgcagtatcttggctttttgcaacttccccttcytgggtttaagtgatcctcccacttcagtcttccaagtagctagtgtgtaacggatcttggrgcccccaaatcaccaggctaaagggaaaagtcaagctgggaactgcttagggcaaacctgcctcccattctattcaaagtcacccctctgctcactgagataaattcatatctgattgcctcctttggagaggctaatcagaaactcaaaagaatgcaaccatttgtctcttatctacttataacctggaagccttctctccacttcaagctgttccccctttccagacccacccaatgttcatcttacatatgttggttgatgtctcatatctccctgaaatgtataaaaccaaattgtgctctgaccaccttgggcccatgtcgtcaggacttcctgaggctgtcatgggtgcacattctcatccttggcaaaataaactttctaaattaactgagatctgtctcagattttctgggttcacactaggattacaggcatgtgccaccactccaggctatttttttttttttaagtagagatggggttttgctatgttggccaagctggtctcaaactcttggccttaagtgatctgctcaacttgacctcccaaagtgctgggattacaggcatgtgccaccgttcccagcctatccttttctgtctgattgaagaactccctttagcatttcttayaggacaggtctggtgttgaaatctctcagcttctgtgtggtaaagtttttatttcttcttcatgtttgaaggatattttgctggatatgctattctaggataaaagytattttccttcagcacaataaatatgtcatgccactgtctcctggactgtaagttttacactgaaacgtctgctgccaaatgtattggagctcccttgtaggttatttcttttctcttaatgcttttaagatcttttctttatccttgacttttggtagtttgattattaaatgtcttgagatagtcttatttgggctaaatctgcttggtactgtataaccttcttgtactgggtattgatatctttctctaggtttgggaagttctctgttatctctttgaataaactttatactcctctctctctctgcctcctcttgaaggtgaataactcttagatttgctattttgaggctattttctagatcttgtaggcatgcttcattcttttctattcgtttgtcacttttgactgtgtattttcagatagcctgtcttcaagcttacttattctttcttctgcttgatcaattctgctggtaagagacccttacgttctttagtatgtcagttgcatttttcaactcaagaattctgctagattctttttaattatttcaatctctttgttaaatttatctgatgagattccaaattctttctttgtgttaccttgatttcattragtttcctcaaaagagctattttgaatcatctatctgaaagatcacatatctgtctctccagggttggtccctggggccttatttaattgatttggtgaaatcatattttcctgcatggtcttgatgctagtcaatgtttgttagtatctgggcattgaagaattatgcatttattgtattcttcacagtctgggcttgtttgtacccatccttcttgggaaggctttcaaggtatccaaagggacttcagtgttgtaatctaagttttcagtcactacagccatatctgaattagggggcaatgcaattccagtaacgctgtggctcttgtaggcttgtagaggtatyaccttggtggtcttggttaagatctggaagaattctctgaattaccaggaaaagcctcttattctcttccctttctttcaaacaaacaaaattgctctgtgctgaactacctggagctagggacgcagtaacacaagcacccctgtggccaccagcactggtactgtgctgggtcagacttgaagccagcacagaaccaggtcttgcccaaagcccacagtaactactacctggctactgcctaggttcagtcaaggccctagggctctgcaatcagcaggtggtgaggccagctaggcttgtgtccttcccttcagggcgacaagttctcctaggccatgggcaggtccagagattctgtccaggagccagggcctagagtcggaaaccttagaaatctacctggtgctttattctactgcagtcaagcttgcacccaagccacaagaccaygttcttcccactcttccctcccctttccacaagaagaggagtctctctccatggctaacaccactttaggcctgtggygagtactgcctagctaccattaatattcactaaggcccaagggctcttcagcttgtggtcaatgctgccacgcctgtgactctcccttcagggcagtgggctctcctctgacccaggacaggtctagaaatgctgtccaggagccaaggtcrggaactggggatctgaagagtctgcttggtgctctaccctacttcggccaacctggtatctcagctgcaatacaaaagytcctttactctttcctctccttttctcaagcagaaggagtctctcctcatagctgccacagctgggaatgtgctgggtcacacctgaagccaacacatccctgagtctcatccaaggcctatggcttgtactgcctgggtattactcctgattattcatggcccaagggctctttagtcagcaggtgatgaatcctgccaggaytgggttcttcccttcaaggcagaagtcctcttctggcccagatgtgtcaagaaatgtcgtccaggagctaggatctggaatggtggcctcaggactctgcctgatgccatatcctactgtggctgagctggtatcaaagctacaagacaatgtcatctttactcttccctctcttctcctcaagcaaaggaaagcagtttctcctgaaactgtaacctgtgctgcctagggtttgctgaggggtgacacaaaccaaacagtcccttggctgccctggttagtgtctcactakgttacttgcccccaaagtccactggctccaagtccagcaaagcaccaggacttgcccaggaattatagtccttgtggccaagattgccttttaagtttatttagagccccagaacactttaggcctgcagtggtgggacttgcatgaagtcaggttctgaccgctggtatgggcaattctcctgtggttaggctagggttggtctaaatgcttcctctgtaggcatcagctgagttctgcctggcattgctttctkctgtgaccagacagcactgagttttaatgcaaagtcccacaatcactgcactttccctccaacaagcacacagattctctctccacaccacatagccacagccaggggatgccggaggggtggcatcagcaattcaaggctgtctttcctatcgtcttcagggcctctttcagtgatatgaagttaaaaccagaaactgtgatcactcactgtgatggctaatattgagtgtccacttgattggattgaaggatgcaaaatattgtccctgggtgtgtctatgagagtgttgccaaaggagattaacatctgagtccatggactgggagaggcagacccaccgtcaatctgggtgggcaccatctaatcagctgccaacgtggctagaataaaagcaagcagaagaacatggatggacttgactcactgaatcttctggccttcatctttctttctgtgctggatgcttccagccctcaaacatctgactccaagttcttcagttttcagactcttagacatacaccagtgatttgccaggggctcttgggccttcggacacatcctgaaggctgcactatcgacttccctacttttgaggtttggggacgtggactggcttccttgctcctcagcttgcagatggcctattataggacatcaccttgtgatcatgtgagtcagtactccttaataaactccccttcttatatacatctatcctattagctctgtccctctagagaaccctgactaatacactcaccaaattttgggttcttaggaaggtgcttctttgtgtggatagttgttcaatttgttgttcctgcagggaagacaataaatgaagacttctatttggccatctttgctctgcctctgaatgaacaatgtaatgttttgggatatacatacatacatacatacacacacacatacacaagcayatattatggatatcaagaaaattaacatatttatcgcttcacatgtttttttttttgtagtgacaaaatttaaaatatattgttttagcaatttttaaatattcatcacattattattaactatagtcactttgctgtgcaatagattttgaaagctttttccctttgtctaaatggaactttgtaccatatagtcagtctctccattctccagtccccctaccccctaccctccagcctctgtagccgccactctattttctacctctacaagtttgatttttttagattccacataaaagtgagatcatggagtatttgtcttgctgtgcctggtttatttcaattggcatcatgttctccagcttcaactgtgttgcaaaaaataacagawtctcctccctttttaagctaaatagtattgtgtgtgtgtatatatgtatatatatatatatmcacacacacacacaccatatttttcttattcatctattgatggacacttaggctgatttaatagcttggctattgtgaataactctgcaatgaacatggggtggaaatatctcttcaatatactgatttcaattggaattgaaatacccagaagtgggattgctggatcatacgttaattctctttttagttttttgaggaacctccatactgttctccataatggatgtgctaatgtaaattctcaccaacaatgtgcaagcgttttgttagttccatatccttaccaacacttctctttcatatttttgataattgccattctaacagataatgatgtgatatctcattgtgattttaatttgcattctctgattagtgatgttgatttttttccataaacctctcgcccatttgtatatcttcttttgagaaatatctattgaagtcttttgtccacttttaatcaggttatttgttttcttgctgttgagtttttcaaattccttatatattttaaatattagccccatattagatatatggtttkcaaatatttcctctcattctgtgagttgtctcttcacactgttgtttcttttgctgtgtagaagctttttggtttgatgtaatctcayttgtctacttttgcttttgttgcctgtgctttaaggatcatatcccaaaaatcattatctaacccaatgtcaaggagcttttcccctatgttttcttctagtagtcttatagtttcaggtctttcatttaagtcattaatatattttgagttgatttttgygtaagaggtaagataagggcccaattttgttcttttttatgtggatatctagtttttattaaaaaatacctagttttagtttcattttatatctactatttattgaagagactgttttttcctattgtgtgttcttggcatatttatagaaaatcaactgaccacagatacattgatttatttctggactctctatcctgtttcattggccaaagtgtctgttttttatgccagtgccatgctgatatggtttggctgtgtccccacccaaatctcatcttgagttgtaatccccttgtgtcacaggagggacccagtggaaggtaattaaatcatgggggcagtttccctcatgttctcatgatagtgagtgagttctcataagatctgatggctttataagtgtctggcattttccctgctggcacttctctctcctgctkccaagtgaagaagaaggtgtttacttcaccttctgccatgattgtaagtttcctgaggcctccctggccatgcagaactgtgagtcaactaaacctccttgctttataaattaccgagtcttgggtatttcttcatagtggtgtaaaaatgaactaatacagtaagttggtactgaggtagtggggtgctgctattaaagatatctgaaaatgtggyagcaactttggaactgggtaatgggcagaggctggaagagtttggagggctcagaaggagacaggaaaatgtgggaaagtttgaaacttcctagagacttggagggcttagaagacaggaagatgtggggaagtttggaacttcctggagacttgttgaatggttttgaccaaaatgctgatagtgatatgggcaatgaagtccaggtggtctcagatggagatgaggaacttcttgggaaatcatctcttgctatgctttagcaaagagactggtggcattttgcccatgccctagagatctgtggaactttgaacttgagatgatttatggtatctggcaggagaaatttctaagtgccaaagcactcaagaggttgcaaagcataaaaatttggaaaatttgcagcccgatgatgtgatagaaatgaaaaaccattttcaggggagaaattcaagcctgttgcagaaatttgcatragtaaagaggagctgactcttaatcaccaacacaatggggataatgtctccagggcatgtcagagacctttatggcagcccctctcatcacaggcctggaagcctagaaggaaaaaatggtttcatgggctggacccaggtccccactgctctttgcaacctcaagacatggtgccytgcatcccagctgcttcagcttcagccatggctaaaaagggcaaaggtacagctcaggccattgcttggaaggtgcaagccccaacccttggcagcttccacgtggtgttgagcctgcaggtgcacagaagtcaagaattgaggtttgggaacctctgcctagatttcagaggatgtgtggaaacacctgaatgtccaggtagaagtttgctgcaggggcggcgcccttatggagaacctcagtagggcagtgcaaaaaggaaatgtggggctggaacccctacacagagtccccactggggcacagyctaatggagctctgagaagagtgctgctgtccttcagaccccagaatggtagattcaccaatagcttgcactgtgaaccaggaaaagctgcagacactcaatgccaacctgtgaaagcagctgagaaggggctgtaccctgaaaagccacagtgacagagtttcccaaagccatgggagcctacctcttgcatcagtgtgacccagatatgagacatggagtcaaaggagatcattttggaactttaaagtttaatgacttccctattggattttggacttkcatggggcctatagcccctttgttttggccaatttctcccatttggaatgggtgtatttacccaatgcctgtatttccattgtatgtgggaagtarctaacttgcttttgattttacaggtccataggcagaaggatcttgccttgtctcagatgagactttgaacttggacttttgggttartgcttaaattagttaagattttggaggactgttgggaaggcatgattgtgttttaaaatgtgaggacatgagatttgggaggggccagttatggaaggatatagtttggctgtgtccccacccaaatctcatcttgaattgtaatccccacatgttgtgggagagagtcartgggaggtaattgaatcatgggggcagtttccactatgctgttctcaggataatgagttctcatgagatctgatggttttataagtgtctgacatttcccctgctgccacttctctctcctgctgccatgtgatgaaggacatgtttacttccccttccaccatgattataagtttcctgaggtctctctagccatgtagaactatgagtcaattataaattacaaattatccagttctgggtatttcttcatagcagcatgcaaatgaattaatacacatgctattttggttactatagctttgtagtataatttgaaattcggtagtgtgatgcccccagctttgttcattttgcttaattactttggcttagggttgtttgtggttccatataaattttaggattttttttctatttatgtgaataatgccattgaaattttgatagggattgcattgtgtctctagatcacttagttaatatgaacattttaacaatattaattcttccagtccataaacttggcatatctatttatgtcttctttattttctttcattaatgttttatagttttcagtgtacagatctttyacctccttggataaatttatttctaagtgttttgtaagctattgtaaatgaaactgttttcttaaattttttcaggtagttcattgttagtgtatggaaacactactgactggtgtatattaattctgtatcctgcaactttactgaatttgtttactagttccaggttttttggtggtgtatttagggttttctatatataagattatgttgtcgtctgggcactgtggctcatgcctgtaatcccagcacttttggaggctgaggcagatggatcacgaggtcaggagatctagaccatcctggccaacatggtgaaaccctgtctctactaaaaatacaaaaattagctggacgtggtgctgcacgcctgtagtcccagctactcaggaagatgaggcaggagaattgcatgaacctgggaggcagagattgcagtgagccaagatcacaccaccacactctagcctgggtgacagagcaagactgtgtctgaaaaaagatatgttgtcaaaaaacatgattttcacttcttccttttatattttgatgccttttactcctttctctctctctctttcttttctttctttctttctttttttttttttttttttttttttttgcctcattgctctggccaggacttcaccagtattatatgttgaaaagaaatgagactgggcatccatgtcttgttcctgatattagagaaaaagctttcaacttttcaccactgagtatgatgttagctgtgggcttgtcatatatggcctttattgtgttgagttgaggtacattacttctatgcctaatttgttgagaatttttatcatgaaaagatgttgaattttgtccaggattttttctacatctattgagatgatcatatcatgtttgtccttcattctgttaatgtgatatagcacattttttgacttgtgtatgwtgaaccattcttgcatcccagggataaatcccacttgatcatggtgaatgctccttttaatgtgctattgaattcagtttgctggtattttgttgaggatttttgcatctaagttcatcagacatattggcctgtaactttcttttcttgtagtgtccttgtctaaacgttttatgtttttactgcttttccaatgcttacttgtaatctggatcacctgaaagactgagcagctggtgggcttgcagatagaaccacaaatgagagctgggttcagcctgagctcagatatgaaaagaggatggtagaaaaccaccacccttcttctgattctattttaaaaactgtgggctcaaacacattctcatgccagactgcaaggttattttaactttagaaaattaaatgttatgaattaaattgtatcagtgataacaaaacatctggcttatggttcgattcctttaagaccggcacctaattgccttaaaatgttcaaaaatacttggatgcatcaagtattttccctacaccttcagaaatatccctggttctctaagtctctataaagttcttccttgttccccctacatcattatattcaccctgcctctttacctctgtttccttgtctattttctctcttattggattgttagagaataacggaggaggakggagagaaacaaaagagatataacaagtatggyatagggatcatgtctccacatatggccttgcaaaaagctatttcttctatctgtgtagtttttggagaacattggacttctcagtggaaaaatgagacctaaactccatgcttcttaactttttggggtaggtcacagaattcccttgaaacattaaagaaagctttgaacttgttactcagaaagctatctagctgctagcttgtccaatttgcatacaattcctaaagcccttccctggaggatgaagctcagccttctgcagtgctgtctcacctgtgagaaggaacccacagtgggtattaactagctctcttggaggcaggggtagtcttctatcctggagcccttgccctgtaaggcacatatcagaacactgaagctaaataatgcatgtgaaaaagacaacttctgctctccccatttcatccaccccctgtacaaggaatcagcttccactagtaaagggggatgattttagattagatgataccagagctgaaaacacaaatgtacttaaccttaattaacacacttgattacaccttccccttctcagcattaactccagtaggtctttagccatgccagggtgactaaacccccaacmaaaaaacaaaaaaaaaaaamaaaaaaacaacaaccatgttttccaaatagcaatagcaattgtgccttatgttatgatcatacccaagagcttaggaagactacattctgtagtggctataattacactaaggggaaagtttattttcttcaagcctagcagtgttctccttttgtttttacaagaaaatctccttaagaaacatctaagaaaatcttctgttttaggttctaaaataagccagccacatttgtttacttcgggggctattttgattagttatctccttaaagtgccttgaagagaaataagacttgtgcttggttagctcactaaaccttggacagacagaataaagccccaggtgttctaagccctgatctgcaagatctggtgagaaattgtactttccagttataatccagatgaccttcaagcttaactggaaagttctcagtgtcttctcctcagatgtggtaggacttgagtcgctgttaggattaatgtggtccactgacaccaactttgtaaagcrtcttgctatagtcagtgtgtgacccttgtggtcacaacacaaagtggtaagttccacaaatgattaaggaactatcctcctcctttccaatatttttctatttcttcttcctaagacatttatctgacaacattagaggattgaakgtttgtaggtttttttctgtggcagctggcattttttagaggggtgggaagagatgggtgccatgaagttgacctttactgagggcctactctgtaccactgtctccttcagtcctcacaatgagcctgtgatagaggtaaggttcttcctggtgggagattagagatggggacccagcttggaggtggagctaatctttaacgtgctctgagccttggtttcctccttccttccttacatggttgctgctataactgagtaggactgtgtgtggagccacctagccaagtgctagacatatgtcaagaactatgaagggtctgagattttaccctgcctgcaggctaacaggtcagcccgccattgccggatgctggcagaagacatgaggctcttggattggaattgaaagactttgctacacagtgtgagcctcagctatggatcggttcccctttcactcaaagtccgacaggagtgatttggatggttctgatggatttgcatcacaraagagaactcctagattagggaatctgaatcccttttgcctagtgttggacagtaaacaagccttccttctgttcttattttttgtattattatattacrcatttcttacattataaaagaagcctgcatcttttataatgggttgcaagcaagtttaccctctcttccactggcagatagtgtctctatcttccagagctgtttgctgtacaaacgtccttgaaaaactggtttataacaaaggytgccagaatctttgctagcaaaatgtgcaggaatgcaagaaactcgcaagagaattatctctcctaaacatttctttattcaatagatgtttattgagtatttactgtataccatatatcacaccaggtgctagggacttcagtggacagaatactcaaggtccctaccctcgtagagtgttggtcatgacacaatattctgaatgacatctccaaattcatgccccaatatcagagtacttatgggaatagtgggacagaatatttaaaattgaaacctcatgagaaatttcagtacattgtccctatgcacacagtaggtgatcaatcaaggtctgagcatttgttgtctggcagatttgatccttagttaattttgaatggaacagccctagactctataaaggcatttaggtaaattcatctttcaggtcatgttttagcatggtggaaagaaaccctgtggtcctggaaccacagagactgggcaggcgccttggttctgcctttccctgcatgtgtggccttgtttatagagttccctctctccagcctctgtattcagagcacttctccttgcacaacaggactagaaagtgccaggtagtactggttgtgtggattcmacaattcatattctcaccttcctgatgagcagattctaaatccagggtcagaggcctcttgaccatgagtgatcatcagacacgtgtgcagagggggcattgagggccaaaggctgaggagagacaagaggaaagagggagactctgggtgcccccagagctggttgctagaggccccaagaattgcctgaggagccatagatgcccactctgcaaagctccccaacataaatatgacctttaaaatcgattctgtaggaacccattcagatcaatcacttctactcaaagatgcagagtaacatgtaggggttaagagtgtggactctccttcaaattacccaagtttcactttcagctctaacaataagcaactgtgcgactttggacaaaggtatctcacctttcatagtggtttctcagctgtgaagtggggataatacaattccttaatggtctggtgtgaggaagaatgaaagtcatccattgcaggcatgcagcacagtatctgtttcatagcagcttctcaggagttgtactgcttcctgtttgtttctgttggtttcctaatagacattacccattgaactgaaagaaccagcctagtcatctcctagcaaaaaaawaataataataataataataataataatcacmcacaattggctcattttctttggggctgtttctggaaagattccattgccttacagcatcactctgcacaggctatgccaggctcaggctgaaaatctgtgaacacagggcttctagcaagcagacaccttgacggaccacaggtggaccctgctcaatactgcagtggtagagccgggtgtgtttcaaatgaaccgatttaatcagacttgccttttctgtttctcttcctccaggatctcttttaactgaacttaccccttcaatttgcttacttcaatagcttaacgaggatttggaatttcattacacagtggaggaactcaagtgcttggaaggtcatttaggtcagcagagaaatggctggaaaagtgcctattactgagcttagtgggagaaaaataacaaaatcactttccacttcctttcatgctctgatgatgttttttctctcccaraaagggattgctaagtattcacggggtgatttcaggatgccacgttttgtcattcagactttctctggtgacttgatgagagtctacaaagatgtggacgggtcagtattatctcttgtaaatggaaaaagtgatgtgcagctcccactgcctggggactgggaaaccttggaatggctcattaaagaggggctctggctggcaggccagttctcagctgcctcttcagagagtacgtgtttgccatcccagatgagggggatactgtttgttctctttccctccaagtagcaggtggggaggatgctggatgtatactggcaaaggaaaggactctctgtcctcatctccatgatctgtttttgggctggctgaatgattttccaaatgtaggataaacacatctgacacagtaactgaagcatgcccatagaatgaccctatatggcagatgcacatgaatgtgtttcgagctagagaatccagcagtggccaacctgcagattcaytccttgtctctgaggaacaacaactgagcccccgtcccatcccatcctgtgggwcctgggccatacaggggattcaggccctgagttttgggttacacgaaggtttccaggtggaggttgttaagaggagggtgttcagtgaaaatgcaatataaactacatgctgtttgcaagcggttgtggttttcttgtccagcccaccactgaaggcaagacagttctcctgcccagcccaccactactggactctctcccctgtatgtaagcccctgataaaaccccatgtctcatttgctggctcttggtctcttcttcagtctcttgaacctggtgcctccccaactgaagttcataagggttcactacaacacaaatagttagatccagggagtgctggggggagtagaagaagatgcaggatctgaaggtagtatcgagaacgaggagtcttgagtttgtgagagccaggccagtagagccccttgcactcactcagctttggccaccctgatgcaggtgacaggaggcaagtgcatcagccatgaaccgcatcaagtgcccacagttgagtggtcatcctgatagttgcttctagttgtgcctgggagaaaagctagacacagtcgttgctgggaggctctgtgtctgtccgtgcagcagtacctgaggccatccctggcagcgttccgagggggaagagaaataggtcactctgctgtaacaatacaccattagtgatagatatttactgggcacccactaggtgcctgtgctgttgccaggtaggtaggaagacactgcctttgttcagcttgacctgggacgggagagccagacatcgggcaaatagtcacacaaatcactgcaaaggaggaaaacatggcaccaaacagggagccgtggttgagtctggaggatcagggaagatggctctgggaggactggtggtctttaagctgagacccaaaaggtaaacaggagttaaccaacaaatggaggtgaaaggtgtggagagtaatgccggagactccttaatttgaaggtagttatgatcacaaaggcatttacagtcagttttctttttataaagctggacagtgcagaattatcacctaatttaaactgaatctgtttaccacagtaattatgcaatctcttgcaatattcatgtttacaggctgtctctctagctgtaacctttttgaggggcaagattgagtctgttctattagtggtcctagtcccagcctcaagcccrctccatgtgtacggaataggtgaatgcmtatgccaggcagtagtgctgggcccaatcaggcattcccaattcattggcaggacatccttagctggggagaggactttcatcacccagcatcatagctggggaaacgggcttagacaggcagaggcactttccccatggtcttgggactccagcctaggtctgacaccaaggctcccgctcttaatcgccccccttcctgtttatatcatattatttgaggtcgtggggaccatcattctctctccttgacgaatcttcggatattattttaacctacagtttcagtgaccttttcacctaacattgtttgatgggytatggtataaatgcattttgaatgaagttggaggagaggttctggacaagactggaataacctcccattgctttaatcatacagtattatagtttgtctatggccataccaccctgaatgcatctgatctcataagtattatattttacttatttacttaaattaataaagttaattttttagagcagttttaggttcccagcaaaattgaatggaaagtatagagagttgccatatactccccacccccacacacatacaacctcccccaccatcaacatcccacaccatagcagcacatttgttaaaattgacaaacccacatggacagtgacaataattatcatgaaaagtccatagtttacatgagggttcactctttgtgttcacattctataggtttggacaaatgtataatgatatgtatccaccactgtagttatcatacagagtagtttttctgccctaaaaatcctttgtgctttgcttacttgtcccaacctctagcaaccactgactctttattgtctcagttgttttgccttttccagaatgtcatacaattggaataatacagtatatacccttttcagatttgyttttctttttactgagtaatatgtagctttctcattgcctttccatggcttgatagctcttttctgtttgtcactgaataatatttcactgtctggatgtaccacagttcatccatccacttactgaaggacatcttggttgtttccaggttttggcaattacgaataaagctgcactgccataaacatctgtgtgcaggtttttgtgtggacattaagtttttaactcctttgggtaaataccagggatcacgattgctgcattgtatggtaaaagtatgcttagttttgtaagaagtcacaaaacagtcttccaaagtggctctaccattttccattcccaccagcaataaatgagggttcctgttggtccacatccttaccagcatttggtgctgtcagcattctggattttgactattctagtaggcgtgtagtgttatctcactgttttagtttcacatttccctgatgacatatgctgtggaccatcttttcaaatgttgatatgccatctgtatatcttctttgaggtgtctattaacgtttctggcccattttttaaatgggttgttcatgctctcattgaattttaagagttctttgtgtattttggataacagtattttatctgataagtcttttgcaaatattttctcccagactgcggcttatctttcgatcatcttgtcagtgtcttttacagagcagatttttgttgttgtttttgatgaagtctagcatgtcaattctttctttactggattgtgcctttagtattgcatctgagaagtcatcaccaaacccaaggtcatctaattttttttcctatgctatcttttaggagtttcatagttttgcattttacatttagcctgtgatccatttgcagttaatttttgtgaagggtgtaaggtctagttctagattaatttttcttttccaatgaatatctagttgttaaagcactatttgttgagtagactgtcttttctctgtttattgcctttcctccttcatcaaaggtcagttgactgtatttatgtgggtttatttctgggctctcctttctgttccattgatctattgtcactattttttcaccaatgcctctgtcttatttactgaagctttatagtgtgtcctcaagtcaagtagttataatcctccaaaattcttttccttcaatattatgttggctattctaggtcttttgcttctccatataaactttagaattagtttgtcaatatccacaaaataacttcctggagttttgatcagaactgcattgaatcaagttggaaagaactcacatcttgacctgattgagtcttcccatccatgaacaagaatatctctcaatttatgtggttctttgatttatttcattagagtcttacagttttcttcatacagatcttctacatattttgttagatttatgcctatttcatttttcagatactartgtaaatggcatcatttttacttgtgcattgttaaygtacaagaaaatgttcaattttttttgtattaactcttatcctgcaaccctgctataatcacttattataatagttcaaagggtttttttttttttttggttgattctttcagattttccacatagataatcatgtgacgcgtgagaaaaakgcagttttgtttcttccttcccaatctgtacaatttttatttccttttcttgtcttattgcattagttaggacttttsaatatgatcttgaaaagcagyggtgaggaggaatatccctgccttgttcctgacctcagtgagaagctcattaagtgtgatggcagctgtaggttttttggtagatattctgtaccaagtcgatgaagtccccctccctctattcctacttaagagtttcttttaaaaaatcatgagtaggtgttggattttgtaaaaatgctgtttttgtatctattattattatatatttyttcttttttascctattgatgtgttagattatattaattgatttttgaatgttgaacaagaattgcatacctgggataaattccacttgattgtggtgtataattctttttttttgtacattgttagattaatttgctaatatttgttgagaatttttgtatccatgttcatgagatattgatctgtagttttcttgtctttgtctgatttgggtattaggataatgctgcctcatagaatgtgttagaaaatattcccttctgtttctatttcctgaaagagattgttgagaattggtataatttcttccttaaaatgtttaatagagttttccagtgaatcgatctgggcttggtgttctctgttttgaaaggttattaattattaattcactgtatttagtagctatgggcctattcagattttctatttcttcttgtgtgagttttggcagcttatgtctctcaagcttgtgtctttgaagggattggtccatttcatctaagttatcaaatttgtgagcatagagttgttcatagtattcctttgtccttttttttttatcccgagatggagtcttgctctgttgcccaggctggagtgcagtgggaggatctcagctcactgcaacctctacctcctgggttcaagtgattcccctgtctcagcctccccagtagctgggattacaggcacatgccaccatgcccagctaatttttgtagttttagtagagatggggtttcaccatgttggccaggctggtctcgaactcctgacctcatgatccacctgccttggcctcccaaagtgttgggattacaggcgtgagccaccgtgcccagcctcctttgtccatttaatgtccatgggatctatagtgttatctcctctttcatttctggtatttataatttgttagattttttcttagcctggctagagtttattaattttctttttttatttaaagaacctgcttttggtttcattggtcttctctatggatttcctgttttcacacattgatttctgctctaatttttatttttcttctgcttattttggatttaatttgcccttgtttttcatcagtttcctcaggtgaaagcttggattaatgattttagatagttgttctaatatatataaatatataaagtgttataaattttcatctaagtactattttgcagcatcacacaaattttgatgttttcattttcatttagttgaaaatattttaaaattttcctcaatttttttctttgacccatgtgtcatttcaaagtgttttttaagtctccaagtatttgagaattttttattctttttgtggaaaaaaaaaaacagaccttgcatgctttctcttcttttaaatttgttaaaatgtgttttatggccaaatgtggtctgtcttggtgaatgttctaggtgagcttgagaggaatgtgtaatctactgttgtaggttgtgtagtactatagatgtcaattatatcatgtgattgatggtgttgttgagttcaactatgtcttgttgagttcatctatgtctttactgmttttctacctgctctatttgtccatttatcatagagaagtgttgaagtctccaactataataatgaagtcatctgttccttcttgcagttctatcagtttttgcctcacatattttggttttgtttttaagcacatacacattaaaaattgttatgtcttcttggaatactgactttatcattgtgtaatgttcccctctgtctctgataactttccttgctttgaagtttgctctgcctgaaatgaaattagctactccctctttcttttggttagtgttagcatggtatatctttttccatccctttacgtttaatctatatgtgtctttatgtttaaagtgggtttcttgtagacaacatatagttgtcttgtttttttatccactctgacaatctcttttagctaatgcctttagaccattgatgtttggagtgattactgacataaataaatatttaccatatttgttactgtttcctatttgttgtcctttttctttgttcctrtttttctcttgcactctttttctgccccttgtaggtttcttgtttgtttgtttatgttgctatgttgcccaggctgttctcaaactcctgagcctgaagcaatcctcctgcttcagcctcctgaatagctgggattataggtctatgccactgtgttcagctctgccctttgtagttttaattgagaatattatttcattttctctcctttcttagcatattagttatacgtcttcactttttttttagtggttgcccttgagtttgcaatacacatttacaactaatccagctccactttcatataacactatattatttcatgggtagtacacatatctcataataagaaaataattctaatccctcactcccatttcttgtatcatgctgtcattaatttcatttacatatagcttacataagtgtgtgtatgtgtgtgtatatgtatatatatatatcttcaaatacattgttgctattattttttgaacaaacttgttagatcaaataagaaaagtaaaagtttttattctatcttttcttattaattatctgatgctcttcctttctttacataaatctgagtttctgatatataattttccttttctgaagaacttcctttaacacttctttcaaggcaggtctactggcaacagattgcctcaatttttgtctgataaacgtttttttttttctccttcatttttaaaggataattttgcaggatatagaattctaggttggtggattttttttctctcaacacgttaaatattttacttcacactcttgttgcttgtattgtttctgaagagaagctggatgtaatgcttatctttgctatctataggttttccctttggcttcttccaagatttttgtctttatttttgcttttctcaagtttaaatatgatatgcctaggtgtctgtattttatattttggcatttattcttctttaacctccctggatctgtggtttggtgtccgataataactaggggaaatactcagtcattattgcttcaaatactgcctatgttcctttctttgttctccttctggtattctcattaagtgtatttacaacttttgtagttgtctcaccactctggactattatatttttatacatcttttttctatttgtgttttggtttcaaaagtttctaatgttatatcctcaagctcagaggttccttcctcatctgtgcccagtctartaaggaacctatgaaaggcaaacttcatttcttttggtgttttgatatctaacatttaaaaaattctttttttagaatttcaatttctttgctttacattattcttctattcttacatgttgtctcctttttattttaaagccrttattaatcatagttttaaaaaaattccttgtctgagcaaatgctgagagactttgtcaccaccaggcctgccctaaaagagctcctgaaggaagcactaaacatggaaagaaacaactggtaccagccactgcaaaawcatgccaaattgtaaagaccattgaggctaggaagaaactgcatcaactaacgagcaaaataaccagctaacatctaaatgacaggatcaaattcacacataacaatattaactttaaatgtaaatggactaaatgctccaattagaagacatagacgggcaaattggataaagagtcaagacccatcagtgtgctgtattcaggaaacccatctcacgtgcagagacacacataggctcaaaatagaaggatggaggaagatctacaaagcaaagggaaaacaaaaaaaggcaggggttgcaamcctagtctctgataaacgagactttaaaccaacaaagatcaaaagagacaaagaaggccattacataatggtaaagggatcaattcaacaagaagagctaactatcctaaatagatatgcacccaatacaggagtacccagtttcataaagcaagtcctgagtgacctacaaagagacttaaactcccacacaataataatgggagactttaacaccccactgtcaacattagacagatcaacgagacagaaagttaacaaggatacacaggaattgaactcagctctgcaccaagcagacctaatagacatctatagaactctccaccccaaatcaaaagaatatacatttttttcagcactgcaccacacctattccaaaattgaccgcacagttggaagtaaagctctcctcagcaaatgtaaaagaacagaaattatcacaaactctctctcagaccacagagcaatcaaactagaactcaggattaagaaactcactcaaaaccgttcaactacatggaaactgaacaacctgctcctgaatgactactgggtacataacgaaatgaaggcagaaataaagatgttctttgaaaccaacgagaacaaagacacaacataccagaatctctgggacacattcaaagcagtgtgtagagggaaatttatagcactaaatgcccacaacagaaagcaggaaagatccaaaattgacaccctaacatcacaattaaaagaactagagaagcaagagcaaacacaatcaaaagctagcagaaggcaagaaataactaaaatcagagcagaactgatggaaatagagacacaaaagacccttcaaaaaaktaatgaatccaggagctggttttttgaaaggatcaacaaaattgatagaccactagcaagactaataaagaagaaaagagagaagaatcaaatagacgtaataaaaaatgataaaggggatatcaccaccgatcccacagaaatacaaactaccatcagagaatactacaaacatctctacgcaaataaactagaaaatctagaagaaatggataaattcctggacacatacaccctcccaagactaaaccaggaagaagttgaatctctgaatagaccaataacaggctctgaaattgtggcaataatcaatagcttaccaaccaaaaagagtccaggaccagatggattcacagtcgaattctaccagaggtacaaggaggaattggtaccattccttctgaaactattccaatcaatagaaaaagagggaatcctccctaactcattttatgaggccagcatcatcctgatagcaaagctgggcagagacacaaccaaaaaagagaattttagaccaatatccttgatgaacattgatgyraaaatcctcaataaaatactggcaaactaaatccagcagcacatcaataagcttatccaccatgatcaagtgggtttcatccctgggatgcaaggctggttcaatatacgcaaatcaataaatgtaatccagcatataaacagaaccaaagacaaaaaccacatgcttatctcaatagatgcagaaaaggcctttgacaaaattcaacaacacttcatgctaaaaactctcaatcaattaggtattgatgggatgtatctcaaaataataagagctatctgtgacaaacccacagccaatatcactgaatgggcaaaaactggaagcattccctttgaaaactggcacaagacagagatgccctctctcaccactcctattcaacatagtgttggaagttctggccagggcaattaggcgggagaaggaaataaagggtattcaattaggaaaagaagaagtcaaattgtccctgtttggagatgacatgattgtatatctagaaaaccccatcgtctcagaccaaaatctccttaagctggtaagcaacttcagcaaagtctcaggatacaaaatcaatgtacaaaaatcacaagcatttttatacaccaataacaggcaaacagaaagtcaaatcatgagtgaactcccattcacaattgcttcaaagagaataaaatacctaggaatccaccttacaagggatgtgaaggacctcttcaaggagaactacaaaccactgctcaatgaaataaaagaggatacaaacaaatggaagaacattccatgctcatgggtaggaagaatcaatatcgtgaaaatggccatactgcccaaggtaatttgtagattcagtgccatccccatcaagctaccaatgactttcttcacagaattggaaaaatctactttaaagttcatatggaaccaaaaaagagcccgcatcaccaagtcaatcttaagccaaaagaacaaagctggaggcatcacgctacctgacttcaaactatactacaaggctacagtaaccaaaacagcatggtactggtaccaaaacagagatatagatcaatggaacagaacagagccctcagaaataatgccacatatctacaacaatctgatctttgacaaacttgagaaaaataagcaatggtgaaaggattccctatttaataaatggtgctgggaaaaccggctagccatatgtagaaagctgaaactggattccttccttacaccttatacaaaaattaattcaagatggattaaagatttaaacgttagacctaaaaccataaaaaccctagaagaaaacctaggcattaccattcaggacataggcatgggcaaggacttcatgtctcaaacaccaaaagcaatggcaacaaaagccaaaattgacaaatgggatctcattaaactaaagagcttctgcacagcaaaagaaactaccatcagagcgaacaggaaatctacaaaatgggagaaaattttcacaacctactcatctgacaaggggctaatatccataatctacaatgaactcaaacaaatttacaagaaaaaagcaaccccatcaaaaagtgtgcgaaggacatgaacagacacttctcaaaagaagacatttatgcagccaaaaaacacatgaaaaaatgctcaccatcactggccatcagagaaatgcaaatcaaaaccacaatgagataccatctcacaccagttagaatggcaatcattaaaaagtcaggaaacaacaggtgctggagaggatgtggagaaataggaacacttttacactgttggtgggactgtaaactagttcaaccattgtggaagtcagtgtggcgattcttcagggatctagaactacaaataccatttgacccagccatcccattactgggtatatacccaaaggactataaatcatgctgctataaagacacatgcacacatatgtttattgcggcactattcacaatagcaaagacttggaaccaagccaaatgtccaacaatgatagactggattaagaaaatgtggcacatatacaccatggaatactatgcagccataaaaaatgatgagttcatgtcctttgtagggacatggatgaaactggaaaccatcattctcagtaaattatcgcaagaacaaaaaaccaaacactgcatattctcactcataggtgggaattgaacaatgagaacacatggacacatgaaggggaacatcacactctgggractgttgtggggtgggggaaaggatagcatgaggagatacacctaatgctaaatgacgagttaatgggtgcagcacaccagcatggcatatgtatacatatgtaactaacctgcacattgtgcacatgtaccctaaaacttaaagtataattaaaaaaaaattccttgcctgataattctcacatcatggccatctatgactctggtttcttgcttgttcagtcttttcaaactgtgttttttgccttttagtgtgctttgtaattttttgttgaaaggtaggcatgatgcgctggataaaaggaactgtggtagatgggcctttagttaatatggtggtgaggtatgggagaaggggaattgttctgtagccctgtgattaggtctcagctattttttagcctctgtgcctggactgtaaacttcactagtgcttctcagtcctacttcccccttaggtggggcgggatggctacagggactggaggtagatatttcccttcctccaggtagattgggctctgataaaagccctcaggttaggctctggtaagttaattctcatgatagtaagccatattaagaacagaatggtttggcatagttcaaaatggattcttttcccttccccttgccaaaagcacaaggtgacttttctccagtattcactgtgaggacctgatagagaccctggagataataaaacataaaaaggtacacstctaccctctacccccttccatgactaagtcttcctggattttttaactgttagatttttccacactgagcctccagcaatttgtcaattagagcttatgttttcttaccccagcactgcttcctgcagaagtttctggttgtgggtttttgctctagtaagctgtgatgctctatattcacctgaccatttttggagcagcatttagccctgtgagctcacttctctgacaaatctaagaggagttgttgtctttctggtttgttcagcttcttccttgtttttctgttttattttttaattccattattttctttgttccaaggtaaaggaagcacctgatgaggctgaagtggtgttcacggcacattgcaaagcaacggtgtccttccaggtgagcggggactcctggcgggagcagaaggagaggcgagcagccatgatggtgggaattctgattggcgtgtttgtgctgtgctggatccccttcttcctgacggaactcatcagcccactctgtgcctgcagcctgccccccatctggaaaagcatatttctgtggcttggctactccaattctttcttcaaccccctgatttacacagcttttaacaagaactacaacaatgccttcaagagcctctttactaagcagagatgaacacaggggttagagagacatgggtagattttaaggaggaaggaacttggactttttcgtcagtgatctgagattcttccctccacagctgagtgctaatgctgtattgagagttataccattgggcctggactgtagaagcagcagagccaaggttctcaagaaagacagcaaaggtctggcagatgttgtaactatgccttcttcccatgtgcatggcagacattgccaattggycatggcttggctccccactgagcaggaacttggtctcagaatcctttccaggacagcaccctaggcagctactgttgattatttaaaattgatgcaagacttgaagctgatttgtttttcctttgtcaatagtttattcctcagaagggggattctctgcacagggccccagtgatctgtttggtggcccactcaggagactttctcctttgtgaaagagccctctctacatcctttattcaccgtacttagcttatcttcctcagcctcttacgcttccccaacaggatagtgtatcccaatttgtgagaagatgaggatgcctgaagttttgtcttaaaaaaaaggtgttcagtgcaaaccatacctactgaatcaggctctcaaagaagaggtctggtaatccatctcttcagttgtctagatggctttcttttcatcagtgagagatacttctggatattcaggttgctctttaggccaactaaattagtatttctgggaggtgaaaccccaggcaacagtgttttttaaagcttgccaggcaattcatttctaggctcagaatcattcttatggtatacacacacctgcatatgacactgagatgggaaaaaatgatgcctattgtaggattcaaaaccaaaaacccctcacccccacccaaaactgccatagtgactcatggccttccagaaaatgttaaatgtggcccagatgtataggaatccaaaggatggactacatcatcttggccacagtctacctgattttggaagcagaatagctgtctattgattaggctttttaatttgcaaaaaagggtctgctccaccattgtttcatttgatgtctgagttatatagatattcttcacccttacactaaagagtaccagtattttaaggtttattagagaatacaggcccacagtcccttttccaaagcctttgggaccagatgtgtttcagaatccagaattactttttgggtttaaaaagccatatatagtatgtagacatgtatggtatagtccgtaagttagaaaacacccttgactgggtctaggacagcagcatgtaatcagtaatttgagtatttctgcagtaagatgtatgaatatatacattgtgagaaaaggactagaaatagcctcatattagtgcaggtcatttgagtcagatcaattgtgttgtaaaatgagttacacacacttgttttctcaactctttgtattttcgcaattgtggatcatggaccagtataaccgcaagccatatacagttcagccctgataggtgccaaccctactaaatggaggaattctgaagagagtctgggaagaatatatggtccaaccattccattgttgctagagattggacatcatgaaggtaattagtatggtaccctggatggccttcttggagttgtgttttggaattctgttcttttcattggaagatacaggaaacattctatatatatatatatatatacacatacatacacacacacatatatatatacacatatatatatacatatatatgtgtatatatatgtatatatatatactttaagttctagggtacatgtgcacaacatgcaggtttgttacatatgtatacatgtgccatgttggtgtgctgcgcccattaagtgtcacttacattgggcgtatctcctaatgctttccctcccccctccccccaccccacaacaggccctggcgtgtgatgttccccttcttgtgtccaagtgttctcattgttcaattcccacctatgaatgagaatatgcggtgtttggttttttgtccttgtaatagtttgctgagaatgatggtttccaccttcatccatgtccctacaaaggaaatgaactcatccctttttatggctgcatagtattccatggtgtatatgtgccacattttcttaatccagtctatcattgttggacatttggcttggttccaagtctttgctattgtgaatagtgccgcaataaacatacgtgtgcatgtgtctttatagcagccatgatttataatcctttgggtatatacccagtaatgggatggctgggtcaaatggtatttgtagttctagatccttgaggagtcgccacactgtcttccacaatggttgaactagtttacagtcccaccaacagtgtaaaagtgttcctatttctccatatcctctccagcacctgttgtttcctgactttttaatgattgccattctaactggtgtgagatggtatctcattgtggttttgatttgcatttctctgatggccagtgatggtgagcattttttcatgtgttttttggctgcataaatgtcttcttttgagaagtgtctgttcatatcctttgcccactttttgatggggttgcttttttcttgtaaatttgtttgagttcattgtagattctggatattagccctttgtcagatgagtagagtgcaaaaattttctcccattctttaggttgcctgttcactctgatggtagtttcttttgctgtgcagaagctcttcagtttaatgagatcccatttgtcaattttggcttttgttgccattgcttttggtgtttgagacatgaagtccttgcccatgcctgtgtcctgaatggtattacctaggttttcttcaagggattttatggttttaggtctaacatttaagtctttaatccatcttgaattaatatatttatttatttatttatttttgagatggagtctcactctgttgcccatgctggagtgcaatggtgcgatcttggctcactgcaagctacgccttccgggttcaagccattctcctgcctcagcctcccaagcagctgggactacaggtgcccgccaccacgtctggctaattttttgtatttttagtagaggcagcgtttcaccgtgttagccaggatggtctcaatctcctgaccttgtgatccgcttgcctcagcctcccaaagtgctgggattagaggcgtgaaccactgagcctggccctgaattaatttttgtataaggtataaggaagggatccagtttcagctttctacatatggctagccagttttcccagcatcatttattaaatagggactcctttccccatttcttgtttttgtcaggtttgtcaaagatcagattgttgtagatgtgtggtattatttctgagggctctgttcggttccattggtctatatctctgttttggtaccagtaccatgctgttttggatactgtagccttgtagtatagtttgaagtcaggtagcatgatgcctccagctttgttcttttagcttaggactgtcttggcaatgtgggctcttttttggttccatatgagctttaaagtagctttatgcaattctgtggagaaagtcattggtagcttgatggggatggcattgaatctataaactaccttgggcagtatggccattttcacgatactgattcttcctacccatgagcatggaatgttgttccatttgtttgtatcctcttttatttcattgagcagtggtttgtagttctccttgaagaggtccttcatgtcccttgtaagttggattcctaggcattttattctctttgaagcaactgtgaatgggagttcactcatgatttggctctctgtttgtctgttattggtgtataagaatgcttgtgatttttgcacattgattttgtatcctgagactttgctgaagtcgcttaccagcttaaggagattttgggcagagatgatggggttttctagatatacaatcatgtcatctgcaaacagggacaatttgacttcctcttttcctaattgaataccctttatttctttctcctgcctgattgccctggccagaacttccaacactatgttggagtggtgagagagggcatccctgtcttgtgccagttttcaaagggaatgcttccagtttttgcccatttagtatgatattggctgtgaatttgtcataaataactctcattattttgagatacgtcccatcaatacctaatttactgagagtttttagcatgaagtgttgttgaattttgtcaaaggccttttctgcatctattgagataatcatgtggtttttgtctttggttctgtttacatgctggattatattgatttgcatatgttgaaccagccttgcatcccagggatgaagcccacttgatcatggtggataagcttattgaagtgctgctggatttggtttgccagcattttattgaggatttttgcatcgatgttcatcagggatattggtctaaaattctctttttttgttgtgtctctgccaggctttggtatcaggatgatgctggcctcataaaatgagttagggaggattccctcttttttctatcaattggaatagttcttataaaactcatcagtgcatttcatataaggatgcagttaattatcctattgcattctttgtgaagacatgttttcttttcatgataatgaggattattaattgactgtgtttatgttttcattttgaggaagaagaagcacagaaccaaattgttggcttaactctggaatttatataaaacccagtagcctgcttatttgtgtataatgtttccagccagtctataattccaattttagatttccctatcctagtgttttatgttcagtttatagtttactgttattctgcatgtttcctacaagccacctcaaatctcgtgaattaaggcagggaagaaagtaataagcaggtgactgacaacctgtaggaggtggaacaggtaaggtatgtagttacgagtcaaattatatattcagtcatccatcattgttgtcttttaagggtcagagctcaatcttgggtctactgaggattttccctcattgactgaaagataatagggggtattaataatctccccacctctcccttcataaaatgcacattcaggaatacatttttaaaagtagtgtttattgagcccccatcatgcacagctgttgtactgggttttatatacaaatgatcacttactcctgcattcactctgtaaggtaaatatagtcctcacttaactatattctaagagggtgagtaggctgcccatggtcacatagtgagtacatagcaggcaggtatttggactcaagtctgcctgtttccaaacatgagaaagatgaaaggaacctaatagaaacctgactagactccatgtttcaactttggcttgcattttgcagcatgagatctgcatgaacctttgcagactacacctgatatagtgaatcctcttgcatgattctagttggattccaggaagaaggtttcaaggagagtctgggtatcgttgggtaggcacctatagaattttttggtttactcttgctattggatagtgtgcttttaatgtttatttggcaggggtttgacttaacgtgctctcattgtggaagcatctcaggcagacggaatcacatgtatgtttagatttccttaaaagaaaactatttgcttgctaagttggtggcaacttctgctggacattttaggcttcaaacttttcttcagttagtaaagccttcttcaactgctcacaataattacaaaatgttgaattcctgaaacggatcagttgatgattgactttatgcaaggatgcacttatgattccttttaattcagagtattcagaatggaattctattgacaaaaacacatctgatttccagttaacattctaggaacatccttggtaagtgtaatgtctctgtcctatctctgtctcctttgcctatagaacatgactaagatggagttgggaggctgttagaggaattcatctctttcctgtgtggatttattttctaaggtatcacaatttaatttcacaaagttccaggtctgtaggatggatgtggctaatggaagagttttattaatttggtcatgtataatgtataaagtatgctacttttctccctttgaatatgccctccatgttttttttttttttttttttattatactctaagttttagggtacatgtgcacattgtgcaggttagttacatatgtata

SEQ ID NO: 97101 - DNA, 30771 bp, Homo sapiens
  misc_feature (1)...(30771): n = A,T,C or G
aaacaggccatgtccatatgtatggttccaaggcccaggctcaacatcatgctctgatccagatggatggatgagcaacatttctacctgaagcctggtgggccagttgatgtttaaggtacaggacagtggacaagtgggggaagtctgcagaggagagagagagagacagagacaggcaaggagaactggacaaagaatgatacagaggctcaatactccaagactttggggctcatttccccctagtgttcactcttcagtgcagcttcaggcagtgggacagttgacgaacttgtaggtctaataaaaaactcctgtaggtaccagctggtggtaacccagcggaaggaggaggaacctagtagcaccagcatctacaatttgaatgacccttggacacccactgtggacttcactgacttcatcaacaatgagaccattgcagggcaggttagttgcgcggaggggtgagcaggcagctggagaggaggggaggagtcagggggacaagatgagccacttcactgcctcagaagcgagattcctcagggatcttcagaaaccactaacaatgaaactttggccgggtgcagtggctcatgcctataatcccagcactttagaaggctgaggcaggtggatatcttgagctcaggagttcgagaccagcctgggcaacatggtgaaactccatctctactaaaaatacaaaaatgagcagagtgtggtggcgcgtgcctgtaattccagctattcgggtgcctgaggcttgaacccaggaggtggtgattgcaatgagtcgagatcacaccactgcactccagcctaggtgacagagcgagactctgtctcaaaaaaaaaaaaaaagaaagaaagaaactttatgatttcagatttttcctgagaaactaagaacatacaggtgggtgagctgactccctatctgcaaggtcactgtgggaggcagggcatgtcctcagcaaagccagacctcgtgatcctctttcttctcccctgctaggacttggtggcctgggtgacagctggttttctgcatatcccacatgcagaggacattcctaacacagtgactgtggggaacagcgtgggcttcttcctccgaccctacaacttctttgacgaagacccctccttctactctgccgactccatctacttccgaggggaccaggatgctggggcctgcgaggtcaaccccctagcttgcctgccccaggctgctgcctgtgcccccgacctccctgccttctcccacgggggcttctctcacaactaggcggtcctgggatggggcatgtggccaagggctccagggccagggtgtgagggatggggagcagctgggcactgggccggcagcctggttccctcttccctgtgccaggactctcttccctccactgccctccttcacatccccctctgagccaggagcctcctgaccctgtgatgcctgacacaggggacagtcagctttgttgatgccagctgtgctgagttcccatccagagaggtgaggcatggcccagcctggagcctggagccgtggctaagcatttctccagaccactcctggttttcttaacagtttgttttttttaatgagacataattcacataccataaaattcatccctttaaagtatacaatttcagccgggtgcagtggctcacgcctgtaatcccagcactttgggaggccaaggcgggtggatcacgacttcaggagattgagaccatcctggctaacacggtgaaaccccgtctctactaaaaatacaaaaacaaaattagccaggtgtggtggtgggcgcctttagtcccagctacctgggaagctgaggcaggagaatggcgtgaacccaggaggcagagcttgcagtgagccgagatcgcgccactgcactccagcctgggcgagagagtgagacttcatctcaaaataaaataaaataaaataaaactaaatatacaatgtcatgatttttttttttcctgagacacagcctcgctcttgttgtcctaggctggagccccgcgctgccttcnnnnnnnnnnnnnnnnnnnntttcgctcttgttgcctaggctggagtgcaagggtgcgttctcagcttactgcaacatctgcctcctcagttcaagtgattctcctgcctcagcctcccgagtagctaagattacaggtgcccaccaccacgcctggctaattttttgttttttcttttgtatttttagtagagatggggtttcaccatgttggccaggctggtctcaatctcctgacctcaggtgatccacctgactcggcctcccaaagtgctgggattacaggcatgagccactgtgcctggcccaatttcatgttttttagtatacccacaaagttttgcaaccattgccactaattccagaacattttttatcaccccagaaggaaaccctgtatgtgttagcagtcactttctatttccccccaatccctctccatttctagataaccacttccctactttctgtcccactgggcttgcctgtattctggcatgaaaagattcaaacaatacgttgtcttctgtgattggcttctttcacttagcgtaatgtttgtgagatacatccatgttgtagtgtatgtcagtgcctcacttcttcatggttaaatgatatctcattgtatcaatatatctcattgtgattatccattcatccgttggtgggtatttgagttgtttccacttttttggtcattatagataatgctgttataaacattcatgcacaagttttcttgtggatatgtgttttcacttctcttgggtatatgcctaggagtagaatttctgggttatgcggtaattctatgtttagccttttgggaaactgccagattgttttccaaagtgactatacttttttccttcttttaaaattgtataaaatatatgtaacataaaatttgccaccttggcccaggcgagtggcccacacctgtaatcccagcactttgggaggctgaggcaggcggatcaactgaggttgggagatcgagaccagcctggccaatgtggtgaaaccccatctctactaaaaatacaaaattagctgggtacggtggcatgcgcctgtaatcccagctacttgggaggctaaggcaggagaatcacttgaacccgagaggcagaggttgcagtgagcccagattgcaccattgcactccagcctgggcaaaaatagcaaaacccagtctcaaaaaaaaaaaaaaaaaattggccactttaaccatttttaagtgagagtttagtggcattcagtaaatttggaagctcttttgggccaccttagctctcctctgtcctgttttgtttgtttgtttgttttttgttttttaagatagattctcactcttgttgctcaggctggagtgcagtggcatgatctcggctcactgcaatctctgccactcaggttcaggcgattctcctgcctcagcctcccaggtagctgggattacaggtgcccgccaccacgcctggctaatttttgtatttttaggggagacagagtttcatcatgttggccaggctggtctcgaactcctgacctcaagtgatccacctgtcttggcttcccaaagtgctgggattacaggcgtgagccaccatgcctggactgccctgggtcttaaaggtgaatagggagcctctagagaccagactgttctcccaaagccccagagcaggttccccagtagatgtgcatctcagttttgggccttgaatagcaggtccttctctctgtctgttccctctcatgctgacaaagtcctcctcctctcggttttcctgctacttcagcttctattccctgctggtttttgttttttggtttttgtttgagatggagtctctctctgtcacccaggctgaagtgcagtggtgtgatcccggctcactgcaacttccacctcccaggttcaagtgattctccagcctcagcctcccaagtagctgggactacaggcgtgcgccaccacgtcaggctaatttttgtattttttggtacagacagggtttcgccatttggccaggctggtctcaaactcctgacctcaagtgatcctccggcctcggcctctcaacgtgctgggattacaggtgtgagcccctgcgcctggcctgttccctgctgtttgtagcggaggtcctgtgggagcgtccctgctgcctcaggtcttgtagttccttcctgcattccttacttctggtgtcctcctctgcccctgggctgggttagccttggatctgcaggtactgtcttgtttgaagaaggacaatgcttggttatctccttctgggggacctatgtctctgaacagctttcttcatcttgcctctctgcatttcattgtcataaaaaaatgtttctcctgtcatcttgtcatctgcctatactaataatcctcttacaagttcctgccatttacacaggccatgcggaatatgcatttgtgagggggaaggatggtcaagtgtcagcagcagcccaggggttttgtgggtggaaggatgaaaaagatgaagggtcatctggtcccagggccctggtgacagtagcctctgttactctgcagcagtcagcataggtgaccagaaagtcactgagggtaggcactaaaaagcctcaggagtggccaggtgcagtggctcacacctgtattcccagcactttgggaggctgaggtgggcagatcacgaggtcgggagttcaagaccagccggaccagggctgcccctcatgggctgtggactttggactttggattggcataaataagaaccgggacaattcccaggaagggatttgggggtgggagtaaggtggggaggaggtagggctcaaacaccaagctttctcaggtgtgtcaaggcaagagaaacttacgcagtatgaggcgtccacacctctgctccttcagtgtcttttctgggagtgagatcaagaagagagggtgtcccgtcccagcagatggtgaaaccccgtctgtagcaaaaatacaaaaattagccgggcgtggtggtgcgtgcctgcaatcccagctactcaggaggctgaggcaggagaatttcttgagcctgggaggcggaggttgcagtcagccgagatcgcaccactgcactccagcctgggcaacagagtgaggctccgtctcaaaaaaaaaaaaaaaaaagtctcaggagctcgggcagccaggtggggagctggcccatcaggagttggcatgcaaatgagccacgtgcctcccagcgggggaccagaggccaggtcagggcaacagcctccagggctgcccgtcatgggctgtggactttgtataggcataaataagaaccgggacaatttccaggaggggatttgggagtgggagtaaggtaagggggaggtagggctcaaacaccaagctttctcaggtgtgtcaaggcaagagaaacttacccagtatgtggcgtccacacctctgctccttcagtgtctttcctgggagtgagatcaagaagagaggggggggtcccgtctcagcaggaagcccaggctgcccacccagtctgaggggacggcactgactgggcaggatctggcaagaggggagtttagggtgcagatttgggtccaattcagcttgtgaccagaagagggatcatcaactgggatcccagatcacatggaatcctgtggttcccttgagaactgcctggacccccaggtcaaccatatgggctggaaaggaagtaagttctagcaaaaggaccttcatacaaggactaaagccgtgggaaccacacttcaattcatgactttcagcatatcttgaaagcacttagatagggaaggtttggaaaggcagaactgctactgccgctgctgctgcctcttctttccattttgtgtctcagctcaaagatagagcttctctttaccctctcagcccagataaatatcttgttttgcctttcttgcatttttttttgtttaaagaaatttggaggctgaattgggaggatcacttgaccccagaaggtcgaggctgcagtgagccatgattgcgccaccgcactccagcctgggcaacagagtgagaccctgtctcaaaaaaaaaaaaaaaaggccgggggggggagcataatagtggaaatgctctgtcttgccctgaaaatgaatgctgtagagagccagggctgccactcttggctgctccacaggttgcttctccagatgcggagatggggagaagggacctgtggccccaggctgaggtctgtgaggggcctgctgctgtggctcacttgctgaccaaggaggatgccatacggccccccactggggtctgagggcgcaacccaagccaccctgaaggggtgtgtgcacaaggagctctcaggagaagcccccaaggtggcctgttggaaggctctgatgggaacatttccttccaccttsaagaaagaagcaatgggaccctgaagaawgcagcccagagagatccaaagggtcagaagctctggggcaaatctggtaaacttcctgggggtgccacagactcatctccaccttgccctgtggtctggccccgccttctggtggagcctgsccccgccttctggtggagcctgccccgtccccaccctgacacttgacctgtggctgacagtgggccacctctgctccactcaggctccgtggccggagagtctgcagcttctctggcattcctcctccccgtctgggtcctgtgatggaaacagtctcattcagctgccccagagactcacaagtcctttactcattcagcaagtattttccagtccctgccatgtgttgggcccctgttaattctatagtaatatttgttgtggtaaataaaattgccttcatagtgatgtcatggtggagggaggaacactcaggagaagagggtgtctctgagcccacagagctcccactgctatttctaagaggccagcaatacatctttgcatttcagaaaactgggtctattcaagaaataaagatggatggaggtcaaaatgggaatggatttggagaacagagtgggggtggggatggagcaggatggaaatgagagggggtggagagggaataggggggaggttggtgatggggaggggacaggataaggaacaagatgaggaagggggaaggtggagttggagtggagatgaggatcaaagtgaggagggctgggtcatcctctggcctctcctaccatgccccatctacacggatgcaaagaaaacttcattcactcatcgaacgtttctgggactcttcctgaatgccagacttgcattggtacagaaaaatgactctcttcatacttgccttcaaagagctcagagtctgggctgcggagaggtctttttataaacaaaaacactggccgggcacagtggctcacacctataatttcagcactttgggaggccaaggcgggtggatcacatgaggtcaggagtttgagaccagcctggccaatatggagaaaccctgtctctactaaaaatacaaaattagccaggcgtggtggtgcatgcctgtaatcccagctacttgggaggctgaggcaggagaatcacttgaacccaggatgtggacgttgtgatgagccgagatcgtgccattgcactccagcctgggcaacaagagtgaaactctgtcaaaaaaaaaagagctatgacagacaagtggggcacagaatgaggagccatctatccctggtgggagtctgggaggacttcagagaggaagtgatggttatgtgtgtttaattggattcatttatttaattcaattagtaatacattcacatgttcgaaatcctaaaggcacaaaagaacttgtgtctggtcatggttgcataattctgtgaatgtaccaaacaccatggaaaccattgaattatgtactttaaatgggcgaatgatacagtatgtgacttatagctcaataaaattgtatttcagaaaagggtttatgtctccatcccacatctgataatagttcctccctgaagtcaaataatatggtgagtttcttctgtatcttttttgttgggagttggggagtgacatttgaagtggtgaatgagctgaatttagtcaagtagtggactgcggaatacagtgttctggcagtgacagaggcacgaaggctcgtggttctgtgaatgccccaatggttggagcatggggtgagggtggcagaatggcaaaggctgattgggggtggggtgagcagagccttggaggccatgcgaggcagtgtgtacttcatctgtaagcagtgatgatccagacctttaagctgcatgaaaaacaatgtgacaataatttaaagacacccaaatctccttccaacatcccgttgtcattcacctaagtgaaactgcagttcttgtctctatgcactcatgcgtttacctagttaggtaagcacagtctaaatacacttttgtattctactttttccatttaatattaatcataagcatctttacaggttgtcatgtaatactcaaatggatttttttttttgagatgaagtctcgctctgttgcccaggctggagtgcagtggcacgatctccgctcactgcaaactcagcctcctgggttcaagcgattctcctgcctcagcctcctgagtagctgggattacaggcacccgccatcgcgcctggctaatttctgtatttttagtagagacagggttttgtcatgttggccaggttgtctcaaactcctgacctcaggtaatccactcgcctaggcctctcaaagtgctaggattacaggcatgagccactgcacccagccaaatggatggtttttaaaggataagaggtactctatcaagtcgatagtaaacaaatcattccccattgggcaattgggttggttccaatttgctatcaagtggaagaatgacccagttggatcttggctttggacaatggcttttacatggccaactcacaggctcagagctaaaagggattcagggagtcagctgggctcatccttagggtttctgtggccgtgagtaagcaccccatctgaacccatttcttcatctggaaagtgataatgtatttaaatcactcaaaagctttttaggccttggtagatttctctgacactggaaggtccaaccacagcctacctgttacgcatcaaaggaactatctgaagacactggaatcctagccaggcagggtgactcgtgcctgtaatcccagcgctttgggaggctggggcaggaggatcgcttgaggccaggagttcaaggtcagcctgagcaacagagtgagattctgtctctacaaaaaattattaaaattagccgaccgtggtggcacatgcttatagttctagctacttgggaagcttgagataggaggatcaagtgacaagcccaggagtccgaggctgcagtgagctattattataccaccgtaccccagcctgaaggacagagtaccccagccttgtctaaaaaaaaaaagacataagactttgacgtccagatgctctctccatattctggcctagaaaagtgtccccatcaccctcttgccttccttggtcagatggcaaatgagtgtctggggcagatgcactctggaggctcaagaggaaacattcggggctgcctgcagcagtgctgaggctgcagtttaattttctttgacatcagtggtagaatttgtccactaggggccgggcgcagtggctcacaactgtaatcccagcactttgggaggccgacgtgggtggatcacctgaggtcagcagttcgagacctgcctggccaacatgatgaaaccctgtctctattaaaaatacaaaaaattagctgaccgtggtagcaggtgcctgtaatcccagctactcgggaggctgaggcaggagaatcgcttgaacccaggaggcagaggttgcagtgagctgagattgcaccattgtactccagcctgggcaacaagagcaaaattccgtctcaaaaaaaaataaaaatagaatttgtccactaggtactgtgctaggtgctggcgggggagacagtgggtcccagacagacagacatggccccccgactggcttggcccaggggagatgctgctggaacaagaaaacctctctgatggttcttggaagtgggagctggcccgaggccctccatctgcccctcatctccctctcagaggctgttgcttcttctctcagaccctctggccccagcttccctgtagctgccacagaaacctcatcatatgaagggaaagaggctgtagcattctcagtagggcccgggtctcaaacacctccatgctgcatgtctcttataccactttttttttttttgagacggagttttgctctgttgcccaggttggagtgcaagtgccatgatctcggctcattgcaacctctgcttcccgggcttaagcgattcttgagcctcagcctcccaaatggctgggactacaggcacgcaccaccatccccagcaaatttttgtatttttagtagaaatggggtttcgccatgttgcccaggctggtctcaaactcctgagctcaggcattccatctgccttggcctcccaaagtgctaggattacaagcatgagccacagtacccagccccttatgcctcttaactttacatctccgggtcagaatatgatggggaattctccctttctcgaggacctccaaggaatgtgatgtctgtcactcccaattctcctattgagaaggaaaagccagtacaggacagaatactctgggccagataatttccatctttgtttcacttaatccgcataacaaccttgaaaggcagatgttaattacacccatttcacagatgcagaaactacaattcagagagattaggaaacatgcccacagtcatctggctggtaaaaggtggggctgggagtgaacccagatctttgcagaattacacctcacggccttccctgggccgtggctctttttccactgcctggtaggcctgtttgaaraattaaacaaggtatcagactcatctgaatattgtaagaaaaaaaaaaagaatgaaacaaggtaatgcttgagaaacccttggcacctgatccatattaagtgaccctctcagagcaaagtcatcactcaaatgacaagggcagaaatatgcagagctgcttttcacaaaggtgctcaaccttgactgcacattgaaatcacctgggaagcttgtaaaactccacatactcggactgcgcctcagcctgatatgatcagagcctctgggggcaaaccacagacatgactggcttttaaatttccccgggtgattctactgtgtagccaaggttgggagaactctggagatggtagttcagttccaagcctcccaagaggaagctgactagagagtctaagacataaagaatgtgtccatcagaaggtgcagaaaggggccaggcacagtgtctcacctataattccagcactttgggaggctgaggcaggcagatcacttgagtccaggagttcgagaccagcctggcaacatggcaaaaccctctctctacaaaaataccaaaaaaaaaaaaaaaaattagccaggatggtgacatgcacctgtggtcccagctactagggaggctgaggtgggaggatcatttgagcctgggaggcagaggctgcagttagccaagatcatgccactgcactacagcctgggcgacagagtgagaagaccccgtctccctcagaaagagagcatcacagagcctgccctgacagtgacaatcagccacatttggagcagaggacctggccagggccaggacacgtcctgtcctagaggcactttagccatgcacatggagtcatcgggccttattgaagctatattgtgaccaactgctggttctgattcccagctcgacaggccagcttcccaccacatcatggtgatgggaagaaaatggacacatcacttacatctctttttgtaaatgaactaattgacattctaataagaattacttttgctttgacagttacagtaaatcaacagattgaccttcaggtgtaattttggtatatatagaccttccctgaaagacaattcccattggtgagctgaggaatctggtttctgattcaggcttctcccttggagtggggtgaattcaccaataaaccatcttgagatatcttgggagatgtcagccagcctcatctgatgcaaccagcctagccacggacttcacgtctaactttcagagcagagactccatgtcagcaaattcctcgcctccttccctcctctcctatagttttggctttttgtattgttttgtttttgttgttgttttgttttgtttttgtttttgtttttgagacagagtctcactctgtcacccaggctggaatgcagtggcgcgatcttggttcactgcaacctccgcctccaggttgaagtgattctcctgcctcagcttattgagtagctgggattacaggcgcccgccaccacgctcagctaatttttgtatttttaatggagatggggtttcaccatgttgttcaggctggtctcgaactcctgaccccaggtgatctacccaccttagcctcccaaagtgctgggattacaggcttgagccactgtgcccagcctgtttgttttctgagacaaggtgtttctgtgtcacccagactggagtgcagtggttcaatcttggctcactgcagcctaaacctcctgggctcaagtgatcctcccaactcagcctcctgagtagctgggactataaacgcatgccaccaccactggctttttttttttttttcaacagggtctcgctccatcactcaggctggagtgcagtggtgcgatcacagctcactgcagcctcagcctcccaggcccaagcaatcctcctgcctcagcctcctgagtcactgggattacaagtgtgcaccaccatacccagataatttttaaatattttgtagagacagagtctccttatgttgcccaggctggtcttgaaccttgagctcaatggatcttcctgccttggcctctgaaagcactgggtttataggtgtgagcaactatgcctggccccctcctatagtttttccctggccaatatccctcttataaatccacagagcttctcactctctgcagggaatattaggtcattcacatacctgggttcagtccctacaccgcagtcatcgtgatgcttacaccccagacaccccagacgtgtgtcctccttcaaacagcctattcccacccactaagcctctgcccatgtgttccgactcctccctcccttccttcctctgcttccttcctctttcctcttccttctccatctagtgacagcttattcactgtctaaaacccaactcgaatcccactctctcgacctttccctgaacaacattatttactttgttgtctctgctcccatagtactttggacagaactctgccatggaggttcacaaactgaactctagttccttgaccacgtgtgtcctcccctcactccccacactgaacctggctttggtggcctggtgmccagcatggtgttgtgcccgtgtgtggatgcttaaatacatctttgaaatttgaataaatagtaaacattgttatayatgagtcatgtttttctctttaaaagccacatcatatccatttgctcattggactacttcaaaagagaagctctaaggacatccaaagatcctaagtgaaaaatcaccctggctgcacgggtcaagccaggacacagggccaaaggtcggtcagcactgacacgctgagcccaggcgtttgctttccagatgagacctgcaccgctggaccagcaatgyagcagaggcagcaggaagagggagatggagccaaagggtttctggacaggcggttgctggcagatctataaatcgatgccccacaatgggctgtcactgaaacaggccaggagtagcccagagcctggaggtagacctgagagggcagggtgtgggaagattagaagcataggctaggccaggcacagcggatcgtgcctgtaatcccagcactttgggaggccgaggcaggtggatcacctgaggtcaggaggtcaagaccagcctggacaacatggtgaaacccatctctactaaaaatataaaaaaaaattagctgggcatggtggcacatgcctgtaatcccagctactcgggaggctgagccaggagaatcacttgaacctgagaggcggagtctgcagtgagccaagatcgcgccattgcactccagcctgggcaacaagaggaaaacgctgtctcaaaaaaaaaaaaaaaaaaagcataggctagaaattggaccacaaaataatatagaatttgacatgtgggtgaagaygggtgttttgggggctgcaaatcagtcatgttctcctcaatctgcgtaagcagaggcaatgcggtatagtggtttacagtgtggcttctggaactaggttcctggggtttggatccagcacatgtgacacatgtgaccttgaacaagttatttaacttctctggacttcactttcctcacttgtaaaaggggaacagtaataaaatctacctcaggatttttatgaaaattaaattagtaaatccatgtaatttttctttttttttttttttgaaatggagtctcgttctgtcacccaggcttgagtgcagtggcatgatctcggctcactgcaagctctgcttcccaggttcatgccattcttctgcctcagcctccggagtagctgggactacaggcgcccaccaccacacctggctaattttttgtatttttagtagagacggggtttcaccatgttagccagratggtctcaatctcctgacctcatgatccgcccgccttggcctcccaaagtgctgggattacaggcgtgagccaccgtgtctggcccatgtaatttttcagaacaagtccctagcttatagtaaatgctcaatgaatgtgagctattatttaatattttattaagtagcatctatgaggtattgaagtgactgtgtaaggaaaccacggtagctcacatctataatccccatactttgggaggccgakgcaggaggattccttgagcccaggagttcaagaccagcatggacactccagtaagaccctgtttctaccaaagaaattttgttaagttagccgggtgtggtagcaagcacttgtagtcctggctacttgggaggctgaggcaggatgatctcttgagctcaggaattcagggctgcagtgagctatgatggattgcaccattgcactctggcctaggcagcagagcaaaacactgtctctaaaaaaaaaaaatagaaggaaagaaaaaggaaaccacccgaaaacatagtggcttaaaacaacaaaccaataccttgctcacagttctgtaggtcagcaacctggctcaggctctgttgggcagttctgccagattctcctgggattgctccatggatcactcacatggactggggctgggtggtctaaggcggcctcactctcagcgctggtgactgggggtggctgtcagacaggccccatgttgtagtaacctgtctccaggaggctgcccggacttctcccccttgtgagctggggttccaattgtagcccaaagagggtaagccctggcttttcaagcttttgcttagatcacatttgttttttgttgtttgtttgtttttctgagacagtctcactctgtcacccaggctggagtgcagtggcgcgatctcagcccacggcaatctccgcctcccaggttcaagcaattctcctccctcagcctcttgagtagctgggactgcaggtccccgccaccagagccggctaattttcgtatttttagtagagacagggtttcaccatgttggccaggctggtcttgaactcctgacctcaagtgatctgcccgcctcggcctcccaaagtgctgggattatgggtgtgggccaccacacctggcctacttatatcacatttgttaatgtcccattagccaaggcaagtcacaagatcaagcccagattcaaaggatgaagacatttacatcttgatgggaagagaggcaaagtcacaatgcaaaagagcacacgtcagggatgggagcattttcacagccgtgcgaacagtgtactatactgggcaccagacatgtaagcagagctcagttctggaggctggaaggaatgctttcttggccctcggggctcaggatagcaggttaagatgcaagcaaaaccattatgatgcaaggtctgaatgcgataagtgccccaacgtaggagttcaaaccagacagatcttttgcagctaatgaggggtggaggtcaatgggttgagaaggctttattttcttgaccttgaagtgtggttagaatctggtcatacagacatggggaaaatgatattccaggtggaggaaaaagcaaagttggaaaaaccaaggcatgtttgggaaatccaaacttatctaatatatctggtgtgtggccatcaaggggaactgcacagcataaaactagaaagataagctggggtccaatgcaggtgagcttgtgtttgaacttcagtttgaacttcattctgtaggcaatggggagccactgaatatttttcaggtgacaagtgaaaagaactgtattgtaagaagactccttggcctgtattctataggatggcttggggtggggagcaagaagaggagaggtgatcacaggtaatgaagggactgtgggcgggcggcggggagggggcgggcctaggcaatggggttggcccggggcagcacgagtagaaagtatctggacagatcctgatgagtgactgcaaatgtgacatgaagaggtgtcaaggttggctccgaagttgccaggctcactgcccagaggatggcagagagcaggagattcatttacaaagcaggggagtctgagcaacaacaggtgtgaagggaccctatggatgtggggactgtatgggacatccaggtggtgtccaaccaaggtctaacgtcatgctaaggaaggaggaggaagagaaaggagaggagactttgtcaaagcaacactgaacacagtgtttcaaggtgcttaacagtcaagtattagatgtggccaaatgattaaggaagaagaaagatgagtagaggccaaccagctgatttgacaatgaggaggtcacaggtgacttcctaggagagcagaggaggctgaagtccccaggctttcttttctttttttctttttttttttttgagacggagtctcgctctgtcgcccaggctggagtgcagtggtgcgattttggctcactgcaagctctgcctcctgggttcacgccaatctcctgcctcagcctccckagtagctgggactacaggcgcccgccaccatgcccagctaattttttgtgtttttagtagagacggggtttcaccgtgttagccaggatggtcttgatctcctgacctcatgatccacccgcctcggcctcccaaagtgcccagggtttctttttttattttattttattttatttttttgagacagagtctcactctgtccccaggctggagtgcagtggtgtgatctcggcttactgcaacctccgctttctgggttcaaggtattctcttgcctcagcctcttgagtagctgggactacagggcatgccaccatacccagctaatttttgcatttttagtagagacggggtttcaccatgttggccaggatggcctccgtctcctgacctcgtgatccgcccacctcggcctcccaaactgctaggattagaggcgcgagccactgcacctggcccccaggctttatttttatttgttagtttgtctcactctgtcacccaggctagagtgcagtggtgggatctcagctcattgcaacctctgcctcctggctcaagtggttctcccacctcagcctctcaagtagctgggactacaggcacatacaaccacacccagctaattttttttagggggttttttgtgggtttaatttttgtgggtttcttttttcttttttttttttctttttgtagaggtggggttttgccatgtaactgaggctggtccaagctttattttttatattttatttattttaatttaaattttgtatggaatgcttcacgaatttcacgacttgtgcagggcccacactaatcttccctgtaccactgcaattttagtatatgtgctgccraagcgatgactgaagtccccaggctttgaggagggagcaacaggcatcctgctttctgggattcgaagttggagagaacccytagacttacatgaccctctctttccacttcacacccactagagtgaatgaaatgttaaaaataaacactgctgttcccttccaccctaaagaagagaggcacgctagactctccctgctcctctccctgtctctctggcctgctggctggagatcaggcaccaccaggcagacaggcgctggcgggacaggcggctgtttactgctagtagagtactgctgtgttttcacagctcagaatagctctatagccacccccaggcctggggacctaggagcctcactgtttattttcatgacaattctgggcctcacctcttcccttctctgagtcaaggtcctcatttgagaactctcagagggggtaaggtgtgggttaaagggtccaagactactaatttcctaattatctgtcccagctggctctggaagaggggaggacgaataactgactgtacaacacgggcgttttggttgggatggaatttcccctgcttttaaagaaagagttgattaaaggactgcatggccagagccggtggggaggaaaacgtgggaatgaaagagggtagaagggatgaccccatctggattgcgacaggttctgtgtgaggagctttcactagagaattatgggggcttctctgactcatggtgcccctcaaatcaggctgggttctggctgccctggtgtttaaaaggtattcagaggtaggggaagactggcttcacagaatactcttttgaactctgaatttttttaataatgtgagtgtattacttttgaaaatattttaggctcactcctgtaatcccagaactttgggaggccgaggcgggtagatcgcctgagtttgggagttcgagactagcctggccaatgtggtgaaaccccatctctactgaaaaaaaaacaaaaattagtcaggccctggtggcctgtgcctgtagtcctggctactcaagtggctgaggcacaagaatcacttgaacccgggaggaggaggttccartgagccaagattgtgcccctgtactccagcctgggtaacagagtgagaccctgtctcaaaaaaaaaaaaaaaaaaaaaggccaagcatagtgactcacacctgtaatcccagcactttgggaggccgagatggatggatcatctgagctcaggagttcaaaaacaacctgggcaacatggtgaaaccccatctctactaaaaatgcaaaaagttagccgggcgtggtggcrcgtgcctgtaatcctaactactcgggaggctgaagcaggagagttgcttgaacccaggagccggaagttgcagtaagcagagatcgcaccactgcactcaagcctgggcgacagagggagaccctgtctcaaaataataataataataataatttttaaaatatgaacacatttatctttttgttctggcaatcattaatcatttacttctgttagataattcaaagccaggcaccacttcattggaactacgttcaaaggactgccactactcagaatatcaaagctgaaaagagggtgagggtccctgggtctcattttacagttgacaaaagcaaaccccagagactccagtgatttggccaaggttgcacagttgttaaattttatttcttttttaaaatccggtgatgcccatggcgggggtacagtttcctgggctgcctgctggaggcttgagagtgtttctgagagtctgctaaggaaaaggaaggagcactttctgccccctgcccacctcctacccaccagcccccacctctctcccgtccacaaccaggctgagcaacagctgggcaattgatgacttggtttctttccctccttctttagtcggtctcaattattccaaagaatccttgagttgaagcaaggagggacagcggtttgggcttagctcaagtcacacttsccttctctcctcaaatagcccttctttgcctctgggatacagaccaggaccaaggggaaagaaagccttttaaaaatagtcctggccacacttttgcaggtttccttcccttgcctctgcctctctagtgcaccatcagcaagtttaactcctggcaggaaggatgaaatttgacagcaagaatgtttcttaacttccttcccttgcctctgcctctgtagtgcgccatcaacaaagtttaactcctggcaggacggatgaaatttgacagcaaaaatgttttctaactgcaaaggtggtttggcactgcaaagggttgattaagaatgggagaagaggttgggcgcggtggctcaagcctgtaatcccagcactttgggaggctgaggcaggcagatcacttgaggtcaggagtttgagaccagcctggccagcatggtgaaaccccgtctctactaaaaatacaaaaaattagcagggcgtggtggcacgcgcctgtaatttcagttactcgggaggctgaggcaggagaatagcttgagcctgggaagcagaggttgcattgagctgagatcacgccaccgcactccagcctgggcaacagagcaagactctgtctcaaaaamaaaaacaaaaaacaaaaaacaaaacaaaaccagaaaagtctaccatctgtttgtgagggaactagttaaatgttcgtggaaacaggttacttcctggagggaacaacagcttcttttgggaagggggctaaggaagagcgaggtgaagaagaggaagggcagttcgtgcttcccataaaggttctggtgactcatttgattttggaagaaggcaggccctgggatggcaggaggaaggtatctagtggggagttctgagatgtttacartgcggcaaatgacttcaggttttcttctgtgcacaaaatgtgcagcccatcctgagacacgctccacgcttcccctacctgckcagttcaaggtcctaaagctgaactttctcactgtgccagagagaagccagccctttgcactggcgaacaatgattaacccgcctctccctccacctgtttttctcaacatgtttttctaaaacataaactgggtcactcacttagaaggtgacagcagttgatctggccagtttcccatgtccaccatgaaacacttcctccattgatcacttggtagggaaaaaaaaaagcatacaaaagaaaagtaattaaaaacaaaaataaaactgtacattttgcactttgggctgtagccctgctgctcggacgaagctgtgaactggagctaggtttcgaatcccatctatagtatgtagaaaacacccattctaggtcaggcacagtggctcacacctataatcccaacactttgggaggctgacagaggaggacacttgagcccaggagttacagaccagcctgggcaacaaagtgagaccctgtttctacaaaaaatacaaaaaattcgccgggtgtggtagcaccggcctgtagtcccaggtactggagaggctgagctgggaggattgcttgggacccaggaggtcgaggctgcagtgagcattgatgggaacagtgcactccagcctgggcaacagagtgagacccatctcaaaaacaaaacaaaacaaaacaaaacaaaacaaacctattgtaggatgataactgagtaaaggaaaggtggctcctctctcaacagaatccagagcccccacccagaatagaagatacagcttcaggtaaaatcagactttctttttggtagtaaatgcaatttttggatgaggtgtgtggtaagttacagctccttttccctctttgctttctcgtctgcaaataaacttgttcgagtgaatgagtcaaccttgccctgggagaatgtgccagggccctgggcccagctgcacttactcatcagcagaccagactgtacttcctggcatctttccttcatgttcttctcaagatccaaagcctctggatttctagttgtggggaaaatgcctgaggagtggcttgcttgggtacctaccaaagaggagcccaaatgattttccatcctcattccttccccaactcagctggccatttccctagagggtgttaacgaatcttctctaccgaggacaaaataatagggaactcactgatatttctacaaaggaaatcaaaatatttcatcccaaactatggctcccaatataataagtactttttttgttcgtttgagacagggtctcgctctgttgcccagcaggagtgcagtggcacgatcacgactcactgtacctcccgggttcargtgatcctcccacttcagcctcccgagtagctgcaattacaggtgccagccacctcactgggctatttttttttttttttttgaaatagggtctctttctgtcacccaggctggagtgtaatggtgtgatctcggctcgctgcaacttccacctcctgggttcgagggattctcttgcctcagcctcctgagtagctgggattacaggcgcccaccactacacctggctaatttttgtatttttagtagagatggggtttcaccatgttggtcaggctggtcttgaactcttgaccttgggtgatccacccacctcagcctcccaaaatgcttggattacaggcgtgagccactgcacctggccaatttttgtattttttgtagagatggggtttcaccatgttggctaggctggtctcaaactcctaagctcaagtgatccaccaacctcagcctctcaaagtgctgggtttacaggtgtgagccatcgcaccaggccgtgactattttaaataaaaaacccttgagaggttttttcacccttgggagcctggaagagattttttcccctatctttcacctataaagataggactggccgggcatggtggctcatgcttgtaatctcagcactttgggaggccgaggcgggtggatcacctgaggtcaggagttcgagaccagcctggcccaacatggcaaaaccccatctctactaaaaatacaaaaattaatcgggcctggtggcacatgcctgtaatcccagctacttggggggctgaggcacaggaatcggtggatctcaggaggcagaggttgcagtgagccaagatcatcgcattgcactccagcctgggcaacaagagtgatactccgtctcaaaaaaaaaaaaaaaaaaggactgacacaaaagaacaattgttcttctccttcctttatcccattatccatcacagaaaagaagaccaaaaatgtaaccataaaaaagtctcaacagaccctttttcaagacaatgactgtctctgaggaccatttaaaatccagggagaactatttacaagttaatttctgttcctcgatccaatcattctccctctgcccttcgacagaattcctcttctcctccttcccataacctgtttttaacaggatccaagccacccattctttctgcaacctcaagatggtggatgagcttccatacctcactgggaagttggatcttcattcttaagcctcccatgtatacatgttaaatacatttgtaatctttttctcatattaattaatctgccttatgtcagtgacttttcagcgaacttgtaggtagtcactcacataaggatcctccagtttacatagttttgtaaatgtcaggtcaccctgtcccactagaccaccaaggtcctggaggacacctgggatttaacttttttttttttttttttttttgagacagtctcgctctgtcactgaggctggagtgcagtgtcaggatctccactcactgcaacctccacctcccgggtttaagtgattctcctgcttcagcctcccgagtagctgagactacaggtgcccctcatcatacccggctaatttttatatttttagtagagatggggttttgctatattggccaggctggtcttaaactcctgacctcaggtgatccaccctcctcagcctcccaaagtgctgggattacaggcgtgagccaccatgcccagcctggcttttaacttttaattcctcagagagccaggcatggtgctttgctcaggaaatgttggttgaattaaaccggagcacttcttgaaaagggaaaataacaaagagttagaaggagatggcgggaacccctctctggagatagttctttaaattagtggattctgcagggcactgttgctcatacctgtaatcccagcattttgggaggccaaggcaggaggaccacctgatgccgggagtttgagaccagtctgggcaatgtagagagacccccatctccacaaaaaataaaaagttagctgggtttggtggtgtgcgcctgtaggcccagctacccagagactgatgcaaaacgatcccttaagcccaggagactgaggctgcagtgagctgtgatggtgccaccgcactccagcctgggtaacagagtgagaccccgtctcaaataaacagataaatgagtggattctcagcaaaacttctagccactcgcctcatatatccacaagacctttgagaatccacggtgtctcgatgcagtcagctttctaacaagctggggcctcacctgttttcccacggataaaaacgtgctggaggaagcagaaaggggctggcaggtggaaagatgaggaccagctcatcgtctcatgactatgaggttgctctgatccagagggtccccctgcctggtggcccaccgccaggaagactcccactgtccctggatgcccagagtgggatgtcaactccatcacttatcaactccttatccataggggtattcttcctgaggcgtctcagaaaacagggccctccccatatgctgaccacataatagaacccctcccaactcagagaccctggctgctagctgccctggcatgacccagacagtggcctttgtatatgtttttagactcaccttgactcacctctgaccatagaaactctcatcccagaggtcactgcaatagttactccacaacagaggcttatctgggtagagggaggctccctacctatggcccagcagccctgacagtgcagatcacatataccccacgccccagcactgcctgccacgcatgggcttactttacacccacccacagtcaccaacacattacctgctctccaaggttaggcgtggcaggagaagtttgcttggaccagcagaaaccatgcagtcaaggacaactggagtcagcatgggctgggtgcgagcccttggtggggtggggaggagactccaggtcatacctcctggaggatgttttaatcatttccagcatggaatgctgtcaacttttgccacagattcattagctctgagtttcttttttctgtccccagctaccccttacatgtcaatatggacttaatgatgggaaattcaggcaagtttttaaacattttattccccctggctcttatcctcaaaaaatgcatgaatttggaggcagtggctcatgcctgtaatcccaatgctttgctaggttgaggcgggaggatcacttgaagccaggaatttgagaccagcctgggccgcatagtgagaccccgtttctacaaaaataaataaataaataataaataatagtgatatgaagcatgattaaatagccctattttttaaaatgcatgagttcgttacctgattcattccctggttcctttcacagtcctccgtgacccaagtgttagggttttggtctctctactatttgtaggctgatatatagtatacacacacacacacacacacatatacacacacacagtgtatcttgagctttcttttgtatatctacacacatatgtataagaaagctcaagatatagaagccctttttcaaaaataactgaaagtttcaaactctttaagtctccagttaccattttgctggtattcttatttggaaccatacattcatcatattgttgcacagtaagactatacattcattattttgcttaaacgtatgagttaaaacacttggccaggcatggtggttcacacctgtaatcccagagctttgggaagccaagactggcagatctcttgagctcaggaattcaagaccagcctgggcaacatggaaaaaccccatctctacaaaagatagaaaaattagccaggcatggtggcgtgtgcctgtggtcccagctactcaggaggctgaggtgggaggatcacattagcccaggaggttgaggctgcagtgagccgtgattatgccactgcactccagcctgggagacagagtgagaccctgtttcaaaaaaaagagagagaaaatttaaaaaagaaaacaacaccaagggctgtaactttaaggtcattaaatgaattaatcactgcattcaaaaacgattactttctggccctaagagacatgaggccaataccaggaagggggttgatctcccaaaccagaggcagaccctagactctaatacagttaaggaaagaccagcaagatgatagtccccaatacaatagaagttactatattttatttgttgtttttcttttgttttgttttgttttgttttgttttgttttagagactggggtcttgctcgattgcccaggctgtagtgcagcggtgggacaatagctcactgcagactccaactcctgggctcaagcaatcctcctgcctcagcctcctgaatagctgggactacaagggtacaccatcacacacaccaaaacaattttttaaatttttgtgtagaaacgagggtcttgctttgttgcccaggctggtctccaactcctggcttcaagggatcctcccacctcagcctcccaaattgctgggattacaggtgtgagccaccacaaccagccagaactttactaattttaaaattaagaacttaaaacttgaatagctagagcaccaagatttttctttgtccccaaataagtgcagttgcaggcatagaaaatctgacatctttgcaagaatcatcgtggatgtagactctgtcctgtgtctctggcctggtttcggggaccaggagggcagacccttgcactgccaagaagcatgccaaagttaatcattggccctgctgagtacatggccgatcaggctgtttttgtgtgcctgtttttctattttacgtaaatcaccctgaacatgtttgcatcaacctactggtgatgcacctttgatcaatacattttagacaaacgtggtttttgagtccaaagatcagggctgggttgacctgaatactggatacagggcatataaaacaggggcaaggcacagactcatagcagagcaatcaccaccaagcctggaataactgcaagggctctgctgacatcttcctgaggtgccaaggaaatgaggatggaggaaggaatgaatgttctccatgactttgggatccagtcaacacattacctccaggtgaattaccaagactcccaggactggttcatcttggtgtccgtgatcgcagacctcaggaatgccttctacgtcctcttccccatctggttccatcttcaggaagctgtgggcattaaactcctttgggtagctgtgattggagactggctcaacctcgtctttaagtggtaagaaccatatagagaggagatcagcaagaaaagaggctggcattcgctctcgcaatgtctgtccatcagaagttgctttccccaggctattcaggaagccacgggctactcatgcttccaacccctctctctgactttggatcatctacataaagggggaagacagaaaaaatcctaccagtgagttgaaaatacaggaaagcctatttcatatgggttaaagggtaggacagttgaatttcgtgaaaagtctgagttatataggctttgagcaaagagttttattagtatgaagcagaagaggtaacataaagaaagatgtatggggccaggcatggtggctcacacctgtaatcccagcactttgggaggccgaggtgggcgaatcactcctgggtgaactcaggagttcaagaccagcctgggcaacatggcgaaactccatctctacaaaaacattacgaaaattagctgggcgtgttggtgctgtagtcccagctactcaggaggctgaggtgagaggcggaggaggttgcagtgagtcaagatcatgccactgcactccagcctgggcaacagagtaagaccctgtctcaaaaaaaaaaaaaagatagatgatgtatgctgtatgaaaaaaggaaacacacagatgattcaacagcctgttttgtggggtaatgaaaagtcaccctgggaactgggctccagccctcgttctgccacccaccaactacatgtccttggcaagtcatatcaattatctgagtttctgttttataatctacaaataggttatctctggcagcttaataataatcagggttaacatttattaaacagtgtgtgccagtccatgtgctatgtgcttttctgtgaggtagttactgctatttacagaaacagtagatgcagagaccaaggtgctgagttaaatgattaggccaacaaggttagtacatgccgagccaggatggaagcccaggtaggcaggctggcttccgcggcaatgctcttatgaactatgttacgtccagtgctgataaactgactctctggggagcaggggaaagccctgagtttagcatttgccaatttctatcacgtaaacattcccattctggccactttctttctttctttcttttgtttgtttgtttgagatggagtctcgcactgttgcctggctggagtgcaatggtgcaatctcagctcactgcaacctctgcctctccggttcaagtgattctcctgcctcagcctcccaagtagctgggattacaggtgcccgccaccatgcccagctaattttttttgtatttttagtagagacatggtttcactatgttgactaggctggtctcgaactcctgacctcatgatctgcctgccttggcctccctaagtgctaggattacaggcgtgagccactacacccagccgcatgattctaaaaaataaaaagatgaagtgttattccaaacatctgatctccattgaagaaccatgcaatctctctgggttgatagaggccagagttagtggctctccctgatttcggtgagaaatcactattccaccatcacgggataaaaggcatcctgactggcggttgacacctatttccacagtgaaagatatatctagtacttttaaaggggaagtggtttgtctgagatactctgtttcaaagtagagaggatacagaacaagcatctgaagctatatacatccttacagagagcaattctgatggaaatgcaggccatgtttccctggggggggctcgtcctaggggctggagtgcattctctgatgtcagaggaaatgcaagattccctgaggcctgagggaacccatggtatatgcaagtccaagtttcaaactgtagttccatatgcattcttccaggacaaatacttcttgaggttaaaaaaaaaaagtcacatagctgccattttatggatttcaggatttttttttttttttttttgagatggagtcttgctctgtcacccagcctgtagtgcagtggcataatctcggctcacggcaacctccgcctcccaggttcaagcgattctcttgccttagcctcccgagtagctgggattacagtcacgcaccaccacatctggctaattctttatattttttggtagaaacggtgtttcaccatgttggccaggctggtctcaaactcctgacctcatgtgatctgcctgccttggcctcccaaagtgctgagattacaggtgtgagccaccgcgcctgcctggagttcagaatcttgggcttcattatttgtgtttaaatagatcatacagtcaggcacggtggctcatgcctgtaatcccagcactttgggaggctgaggtgggaggattgcctgagttcaggagatggagaccagcctgggcaacatggtgaaaccccatctctactaaaaatacaaaaactagctggatgtggtggcacacacctgtagtcccagctattcaggaggctgaggtgggaggatcccaggaggtagaggtcacaatgagccgagattgcgccactgcactccaggctgggttactgagccagatcctgtctcaaaaaaaaaaaagataatacattcaaacagttcaaaatgcaaaagttacatacataaggaagtgtcatgaaata

SEQ ID NO: 97102 - DNA, 13622 bp, Homo sapiens
ctttttttttttctactttctacttcactaatcaaatgtatattagattgattattgtaaaagtataaaccatagaaaatttgacaagatagatgtgtaaattatccttctgacagaagtaatgatgcactccaagcaccttctgttttccagcgcttggtgagtgacttcattaaatatgcaatggctgttgggtggcttctcagacgatggttcagttccttgtggaattgcattattactagaggtgtaaaaccaggcagacaagctagctgttgggcatcctgctgaggttctaatgtgctccatcttgttggagcagttgtttgcagtcttttcaggacaattacatccataaccacaggatacattcagtgaaactgtattacagataacagtggagactggtattcactgctcgtcacccctctctctcttcagctgcctcagtgtgggcagcttatagtagtatggtaaagccccttttaccattcacagagtagttgtttaaaaaaaaaaaaatcctgtggagcaaatctggaaaaaactgatttttaacttttttaaaaagtgcttaaaatcatagaatattagagttgaagagaccttataaagtctaatccatttgcaagtgaaaaaacaggctgaatcatagtcacgggcagtcccttaggagataatagaaggtcctggtagaatatcttttaggtggtagagattgcaggaatagggatttatttactcttagcttctggttttagagctatctcaaacaaaatttttcattttgaatttaaggttttttttctgctgaacttcatttccccccgtcttaataccagcaatacctttttatttctgaaagccaagcagataatttgctttctgagattatcacagtatttattattttgatgacaatttgatggtttcttagagaactggacacaaaagatggttttagttgagctcgaaatggtatttaaggtttccaaaaggcagatgctatgatgtatcactatagcctaataaatgggaatgcattatagaatgacaggctgaatactttaatgaaagaaggtttcccatttcagttggtcaattaaatcactgttgatgactttggatcattaatgaacatttgtagaaaatgaccgtttgaattcaattagtatgataataggttttttggagaagtacaagtacaaataatcctaactgtaaattaaaagatttatccattttgccacagataagttagcatattgcttgctttttaataccagagcaaactgacatttcagaattcttttacagattaagtacatattctttcttacaaaagttctacttacaaaaggttatgtttttcattgagtaccttttgaaatataatttatgctgctaaccattatgttacttcactattctcagaacaaattagcaagacctagaaacaaaaaaagggaactttgtacagtatgtaaaagcaaaagattaagtttacgatggattaggtatttgatttatttaatgccttaggaaaaaaattctaaatctggaaaaacagtaggaagaaagtaaccattatttgggaacatgcaaatttatttaaaagtactgtgaaaagaaaatgtaaatagaagcttaatagccagaattttttcttgagcctattaaagtttcaaattttcttattatttgaagcctttatgttcgttaaaatattttaaggatatatatcctgtcatttttgctgaatttacccaacaaattcatctcaatgtgatgtttttctttagttaacttcattttctctaaaacttgggtgtgttttggtagttaaggcagaggtgggttctttcgaaatgcacgtttttctcattttgttatttgtaaaatgggctataatctctgtccaagcttccttcaatctccatttcatagtttacagagaaaggagacactgtggagcacagacttcccctgggaatacattgggcttaatgagcttgatagtctggtgggctcaataaatcaaataaagcaaaacatttctcatttttgaataaaagcatttatcacacagtgtttgttcactcatggtcacaagattgattggttcccagtatcatagcatatattgaagcatttttgattttgtttttccagtgggcaagttacggaagcaatggctaaaggaaagtatctctgatgtcggctttgggatgctgaagtctgtcaaggaatatgtggaccccaataacatctttggaaacagaaaccttttataaatccattagtaccattacaaaaaaatgtcaattttttttttaagttttcaactgtggttatactagtaatcaaatatatcatggactatattttggatacatttgtttctttggtttaaaataagtttgttttcattctgtagtttgttttgtttctacatctatggattgacagatagtattcctaaatctctctcattgtaggtacatcattttacattcagcggttgtcatttcaaattttagtcaggcagcacaaagctgtcaattattccagaggaagctgctgccagctgttttgtattgttgcttcctcttggggaacaaagacagatttggtatcattgattgctcagctagcctctttttaaaagaacgtttctgggaatcagatgtctagggaaggattccactgaggagtgatacacgtgtacattgtttaagagcatagtctagtgtgagtaggccattaaggggaaggatattcatgaaagaatttaggcaacctgttatttagaaagccttcacgtctgtaaggtgcttggcctacttttttttttaaattagtatacatgcataaaaccttgtatcatcaatatacaaattattctgttaggggacatgtttttgttctccatgtttctgtttctattgtggtatgagttgtatttgtatcactgagataacctattgttatattctaattcattgataatatgttttgtaagaaaagctgacatccttcattgcaagtgaagaacaggtttaccatgaaatgaatgcctttattcaacttagagtcctaatgtttctgatttcacattcttgttgctgaaatgcagaagaaacagctacagcaagagcagaaggaaaactcttagacttaatgtctccaattgcaagaattgtttcactaaagaaacagtcatcattcaactactgaatttgaaagcctcagcagtttcaatgacaaaaatcatttttgattttttaaaattaatcccaatggcatgataaattttcatataaaaagtaaagtttcaatttagtttttaataatggtttaatgccttttttgaataactggtttaacctaattttttttaaatgtaatgtattaatgcatataccataatcaaaagtttgaaatatcctgtttcttaaataatgagaacattaatcacatttagcaagcatttgtacattcaaacctggatattaaagtgaaatgattactttgaatcactgtctgccaaggttcatgattcacattttgagatggattcttttcttaatgcaatacctaacttttgataattttttaaaactaatatttgatcagataatgtaagtcaaaatgcagacgatcctttaaaaggatgcattgtctgtgtatgtagcaacagctccaaagtatttttgggcagtttgataccttttatatctgaagtagccttaaccagaaaaatggtaatttaaaattgacaaaatgatatttttaagacttcaaaatgataaataatttttaactattaaaattggcctcaaactaataaatctgtaattaaattagaattaaatatcagtttaacaacaaaatgaaatatttattttttagaagctgcctctcttcattggtcatttatttttaattataaaatttccaacagatctttgctttaagcccttgatatttgacctagttggacacttgatgaggaagttgcctctagaattataaaaatctcagctttataaaatgcatctgttcacgaaggtaatttctttaattggtgatcaaaatataaaattaaagaaggtactaatgtctcactggaagtatatatatatatatatatatatgtatgcgtgtgtgtgtgtgtatatatatatatatatgtatatgtttctgagtaatttttaaaaaataaaacaggttaataagaagatccattcctttgcatgtgattgttataacattctttcccagggagttcaatttcagcaacctcagaaatccatacttgatattaggaaactgtaaatgtaacacctgaaattattatgttcactattctacatgaaccttatggaaattcatgatttatgtctttgtttttctttttccaagtatatgcaggactccccaaccttgattttataatggtgactgcattttgtaggtggaatcatttctaccgaaatcattttgaaacacaagaatattgatcagtactgtttcactctgatttagtaaatcagaaagcctccccctacccccagcccccactttcacataccttctgggaggtgcctcagtatagacttggtatctgtgaaggactgagttcatgaatatgcacagaagcacttaaaccatgcctcttatttctataatatctgaaaatggcttcataaaagttaagtcaggagaacactgtttacatgacacttcttaactcatttttaatgtttatttttaatttcaaaaacttgttgcctatttggttttcagtactgcataacactgactttcttaaattagtcatagttgcaataatttacttaaatttggtaatgtcacatttgggttggggtttcagtgggaatagtaacttgccgctagtgagaaatggcattgaatactaaagactcaatatgaacaggctttatagacccttagagaaactgttgccttaatgtttggtgcaatttctagtagtgcataagtgaatttagtcttatgataagtaactttgagctgtttttagcttagtaagaattgtggaaaccacatgtttattgtgcccatcattttacacaaagaaaagaggattatattatttcttctaaggaagtaggagttttcttcctaaaagtgcttacatattgtagtactattacttaaaagttatttatgaagttgggagccttctagtttgcctgtgttgatgtattttgaaaacaaaattgcaataaaggatgagcttccatcggtgtgtatggtataccagatacagatggttgcaaggaaaccttttcccccactagaatagtctattagtaactgctaagtcctagcttgcatttttgaaaatgcctttctgcatgttagcacccagactttcctttgtcatattcctttatagctacaacttaactgtagcttatcagagaagctctgtagtcctacactgaagtgtgttcccttggctgttcatatggggctgggtttggttgaacttccattctgtataaatgctagaacacagttactacagattgattcacaaactgcatgtgctggtgcttgaggcagccaaaatggaatgctgtggaaagcatatctatatcttaaaaaacactcagacaggagttaaggacagctttaataatttttttgtttaccacttaatctttatcaactttgattttagttagggcttagctcatggttgaagaaaagtggaaaataacaagtgcccatttaggtttgaagaatccagaatgttttacctttgactttatgagttatagaagcttggctttgctctaggtttcatgttcccaaatgagccatctgtcagtatattcacttaattcttactaatttcagtttcctgtaaaggaaacaacttacatattgatgcttaaatccagaaagtgtaaaaggttttcttaaactgttaaaatatagtgtctgatataaaggatgtaagttactcagctttctgctccctaagccaaacagtgtttgtcttcagtgtgaaatttaactgtaaaaactacttgtaatgtcaagagattatagatcatattattaataaaatggacctgggtctaatatttttttttcttcaaagggagtgtgaagctgtttattcttttatttgcatatgagtttttcttttagttttagtttttcatgttcatatttccactgatttgaaaacacaaaatttatttttataattttgttgcttgtagcataatcaagtgcaaaatcaagtgcaacctacttgtgactaaatctctttggatttatagctgaggatattgttagctaggttttgtcaatccctaatcattttttaaaatcaatgctgtattcccaggaggctttgagactcctatgaacctgaagcactcccttttgaaccttggaagatcctcaaagagtgagcactcttgtgctcttctaatcataattaattccttaacaaatcagagtaaggaccactgacatatagaacmctcaagccaaagaaccatcacagaatttagtaactttagttctgtgaacatgaaaagatttcttttttggtttccaaaggagattatttatttttccacaaggaaaaacatcttgcagagactctgaattccaaatctgagtgagaaagaaaaggaaaaaaatctgtttcatggtggatttctaagcaacatatatacatgtttttaagacaaccttttgttggcagtgtttttcctgaacaccatatgcaccctaggaaacrtgtttttcctttaatcttgttcacatatcagaaaaggacatgaaatgctcatactggcatacaagtttctataagtagttattttttgagctacttatactatatccccaaaagctcacagtgccttgttgggattttttttttccatgaactagccattattttaaatgagtgggagagggtaagtctttagacagaggtcattcagcagttcaagactattcctcttcaagaacatgtcaggaattaagcagttatatgtggaaacactggtaattctttccacagtgttgttttggataatctgttctagtatatttaactaattgtatggtggacctgtactctgatacacatcgaatcagtcaatgggatttgtatgtgcttttccttcctacattttcattcctactgccccaacctagtagccctaagttgtggcttggtgggtttggcaytgagcctcaagacactcactacattctttctggatgtttgctcacaggctccctgaggagcagaacctgtggagctggggagtgcgggtggtttctattcctaatattgtgtgtcagtcctttttcgtgtgatggtgccttcagaataacgaatatttctgttctggacaatgattaaatcttatgagaaatatatgtaggttatattaattcttgtccatttttgctaagcctgtgaaatactttggctctgatacaacttaacttgaataatatcttatcctgagtcttcctccaaggcagtacatattcctgccaggactgtagtaatcctttgggaactacatgtgagtaagcacttgtatgtaagccattatactgctgtaactaatgcatacaaacaattcttctctttacatttatagtctaaaaggggatatgcagtgggaaggaaaattcctgagagattccagcatagctttgtcaattccgactgagccatactgttttccacaagggctcaacacatagtcagtattccgtgctttcagtgtgtgttcagattctcctcttactggttttcttagactgtattgttctataagcaaatgcccatgtgtgatttttaagatgtgctggggaaaaataaatcaataccacaaccacccattgttatagaaattgttgtttatttcatattggttctatttaacctttattgacagcatgctatactcggccaaaacaaacaggatacactttgtgcccatgagtaccctctccggtagtgaagggcatgtgcagatactgattttataatggtgattttatatgcagatatatgcagattttaatgcagatactgattttataacatccctgcctgtggctcccacactgaaaggaaggttgtagctgtctgggctctgaaatgactgaaggtcagacctgttgaactctgtcttacatgatacatttcagtaatcactagccacactaagattttagctcttgtattatatagttaagaaaagcaattttctacctggcttatgtaagttcagattgaattaaccctagaaatcatcccatcttatttctatttcatcccatctgaacataattgctacctaacattccccaggctacaagcagataactagtcttcctgaacatttgctgtgaacaaatgcatattcattgcctttccaggaagccttttccaacttctgtaatcttcaagtattaggaggtttttaaattattattagactgaaatctgtgttcctcttctatcccttatacaacttctgccacctttagtcataaagaattgtccaattgctctgttgaagggctgctcttgaggtatttaaagtcaggtctcatgttcctcaacaccttctcctatcaacttttgctcctgtcatttctagactttcaccttcctaatcttcctcacatgtgcccattttacatttttacagtgaggtgtctaggcctgaaaacaaatcttccagagtagtaccaatgcttcctctagtgtagtcactaataaaaaagcatttttggtgggcattgctctgtcaactcatactgaatatatgccatttaccaaagattgtcttttccatgtgacattttggccgcatctccttggaggctaatttttttaaagccccattacttatatttagctttactaaaatttgtatcttactggagttagttccatattttcaaaatgttaggatctagattcttgcccagaatattttctgtgccgtcaagcttcaggtcatcagtaaaattgagacaaatactgtctggattttcatccaagtaatgacagataattggtacattacaagggcctacctgacccatgattctgacatttcatccatgaaagaacattcaggattcagacatctacactttcacttgacatacagttgtccaacttatatttttacattttggccacaaatacgctttttattcagttaatcagcatttatgtcagataaacaagtaatcatgtttacttaacattttctgctgccacagtgaaatcctgataaagctactactacagtttcctgtgctaccctataagaaaaagaaatgaaactttccggccatcacatttccttttgcctatgtttggcctcaggggcgtgtctctctttttgaaagactcaaatccattttctactgcattttctgatgtggtctgttgattgggcctggtattgcctgatggacaagctctgaaatccacccttgcatagttttgccatgtcctttgtacctcattgtgctaacattagatagatgaagctgctcttctttgaaaatggcagaattttaccactgtaaagtaacttagaagataggattctaaatacaagaagcagtggataaggttctattttggacattttgggtgtgattcatttttctcaatgaacttcaagtcactttccctattcatttcttcttttatatagtgaaaaactctgaggtccctttcaactctgtctcagtgattctaatgagtctgtgtttttttgctgaacactaccctagaattgattattatataattaattttttaattcatccttttttgccagacaggcaagaaggtagcattgttatcacaacaaccctgtgaagtaagtgatatcatcccctttttactggtgaaaaaaactgaagtttggttaggttaagaagcacccaccattagtagctgggaagtggcattgcagggctgtggagccaggtgactaactccagtacctgtgtgctggctgcttcactgctgtaggctacttgtgctggatgactatgatgtacacagaatgtatttttaaagtagattattagttgttgtcctctacagaagggcacaagtgttggggtgatcagacccaacaccaggtcatcggggtgatgaagtccagtagaatcaaaggaatgagaaaagacagtttgagagataaagtgggtctgggggccaacgcgagtatggaggctgcaaaggccccgagctctggaagcccagactgtttattggtgatcaaacaaagaaacagatggtgagaatgtggggttgaaagggagcgttgcattaagcacatgatttacagctgtgacggtttaacatttgtatggccaattctaagacacaattgatctaggagcctgggagggctagaagcaaggagccagcaagtctagacacattccagaggccatgagggattttatgccctgagccctggattctttccaatctacgaggggttttatgccctgggcttagatgatggtgcgtcagggtagtcttccaccctttagcacagaattcagtgttccaaaggccacgaggggttttagaccctggcccccggacatgttccaggactctttttacattatgtcagaaatgcaaaccctgcctcagcttctcccaacactcagcttttcccaacaacaagtaagaagatggagtctctttctcctacagagtagaagctgctctctttgtgaccacatgccatagaatgccagaaaggttttttctcagatattgtcttgctgtgtaaatgtttaacccacagtatcctgcactgattttgtgggtttaatgtgaaactcataaaaggaaatatctgatggagttaataaatttgcatttttataactttaatatagtactatttgagctgcacttaaaaatataagacaatctttttctataagttatacatcttccattgggagactggaaattgaaagaactgtttgagattaaagaaatgttttattataacctagagacaatctaggaccttaggaaagtcacaattccttaaaagtactaatttaagaattcaggttgctgctgtagggtttgagctacattagggtactcaaaaagtatatataactggaatgaaagtatcagtttagaatctgatggttacagtcatggtgattatgtagttggacaaccaaaacccaagagttactggctcatgacaaaatgtggtttgactgaatacaaagggcatagcccaaaaactgaaaactactgaaaacccacatgtcactttagtcccagaggtaggtcaacaagggataagaggcatttagtgaatggtgcagaatgagctgcaagtcacactaataccaggaaactactctgtggcagagaacactctcagaaacacaacctctaggtctttccagatcacccagagtcattaagaaaaagaagaaagggaacctgaaacataaaaattatatttgaaaatcctgatactcacttgtaaagtctttctttagtgatgttatccttttaaagttaggttgtttaggtagtctcactctgcttaactgtagtcagacttccaacactgctaaccctccaggacaccagggagaaaatgagcccagatgaggattatagggcagaggggtcagaaagttacttctaaagcttcccctccaagccatttaccctttctaatttcacatttcctaataagtatatttatttgggcatctatcccatagccctctctaaacaaatcattctgaccttgggccaaacctatcactgtgattctgtatggattccatctgaggtgctcctctaagcctgtgaggccatacacccctcaggttaggagtgtccctcctatgatgacagctatcccattgccagatgacccaccttcatccccacacagtcatcccagttcccaattgtctgcttctcatgaatgggtcagagttagccaccacacctgaccttcacagatggtattggggcaaacatccattctgcagctgaggccacattcaaagggggactgtcgtgaggaataaaaatcctttgacaggcatgtcatgccacccatcaaaggagtctgtgcttgctggttctgcacagagagatcaagttcttgttcctgagaaaacaaatataactacttgtgtataagcacacattcctattttgtgtgtgcctgtgtggagaccaaggggttgacttaagatgaaatactcgatatttgattcctttaaaatagactatgcaggtattatgaagaaatcttaaaatattccttatatttccataatgaactcattgttgtcaagaaaagtgcttttagcgctttatgtactctaggagcacagaataaagctttcatttgagttttaggtacagaagctttcactcaaatggcaaaatatggggtcactgtgaagtcattttctttttagaatcaagaagcaaagcagggtactttgaatgtgagttttaaagatatatatcctgaaaataaggacaacaagtgccaggggagttaggaatgccctgtcttcccaggcctcagcaccagacttcttgactctgtgtggttcataagactttgttgttgccagcagcaatctgaatctgggtgggttcctctctgagagccagggtaaggaaggggacaaatggcatggttcacctttatttcttagtggtgtgagcagtcaggatttccttatacattactaagcaggaaatcccaaatgcccagcagcaaggggttaaaaaccattctgaaaagctttttatgttctgaaaagttaaattacacatacatgaaaaccacaaacacatagcacctgggtaaataaattgtggccaaataaagaccaggctatttgcaaaagggaatctggaaaacatttgtttttgggtggttaacattagttacactttatgcttttttttccccctaaagaaaatagtgtggtttagaagaaacaggaaaaaaaaaaagaattttaatatggccattgaaaacaagatttcagttcatttactttccaaatcttaaggggctaccaagactgacaggggcacaaagctactgcagcaacacttttagtacagaagttgtcaaacaaagaacatttcccagacattgaatgtgctatgggatgcagtgaagaggtcactaaacattgcttgtcctccacatgtgagactaaagcatcagtggtaaatgatagcagctcagataattaagatttaaaatgccataaattcaaaaccattgaacttcacaataagccaaatttcctggtataatacaatttgagcactcaggaggtcatgctacagaggaattatgctgagcatgtttcttatcagtacttatgtggctaagtggttccttttccttgaaggaaaaaatcatctcattatggcagaggttccctatcattcagaagaaagctactaggttgagctatgagaaactgctagttttgtacat

SEQ ID NO: 97103 - DNA, 47299 bp, Homo sapiens
gaggggttccttttgggttttgctgtcagtccagtgcagagatacaggaagggcgaaggaaagaaaaagctagagcagtgacagagagaaggagataaaaagacagatttatgatctgggagtctaacctcaagggccactctggggtgtgctttgattaattgcccaaggcatgcttgaaggcagaaacttgagagagcgggcgctggggaagtgtccttgcgggacctcggtgggcattagccttgactggaaatgatgagtgtgtcccatgcaattagctgtgggagagctcagggaataccctagggttgtcagaccttggccttttcattttcaagttatctgtgtaaacctttgaagaagctcaaattattaaaatattccttttctttctgccttcttaggtgccctttctggtaactggaggcccagatgtgcccatcacgttttttctgaggcttttgtactttagtaaatgcttccactaaactgaaaccatggtgagaaagtttgactttgttaaatattttgaaatgtaaatgaaaagaactactgtatattaaaagttggtttgaaccaactttctagctgctgttgaagaatatattgtcagaaacacaaggcttgatttggttcccaggacagtgaaacatagtaataccacgtaaatcaagccattcattttggggaacagaagatccataactttagaaatacgggttttgacttaactcacaagagaactcatcataagtacttgctgatggaagaatgacctagttgctcctctcaacatgggtacagcaaactcagcacagccaagaagcctcaggtcgtggagaacatggattaggatcctagactgtaaagacacagaagatgctgacctcacccctgccacctatcccaagacctcactggtctgtggacagcagcagaaatgtttgcaagataggccaaaatgagtacaaaaggtctgtcttccatcagacccagtgatgctgcgactcacacgcttcaattcaagacctgaccgctagtagggaggtttattcagatcgctggcagcctcggctgagcagatgcacagaggggatcactgtgcagtgggaccaccctcactggccttctgcagcagggttctgggatgttttcagtggtcaaaatactctgtttagagcaagggctcagaaaacagaaatactgtcatggaggtgctgaacacagggaaggtctggtacatattggaaattatgagcagaacaaatactcaactaaatgcacaaagtataaagtgtagccatgtctagacaccatgttgtatcagaataatttttgtgccaataaatgacatcagaattttaaacatatgtatatgagtggcgttttagtcataattttgatcagttcaaaaaggaagcatttactctcttcagcactcagccttcagtaaacactctgtagtagggatgacagaggacgtaagggtgtacgtgacatggtccctttcctcagactgttcccaggccagacaggtggagacagcatgccactgaagtgaacagaacttaccccggccaagtgctgagaagaggcatgtatgggccacaggtaggagcgtgtattccaccgggtgagcctggaaagccccatagaaagagggacatttggcatgggtcttaaagaggggtgggagtctgtcagatgaaccaaggggggggcattctcagcagaaaaggaagtgtgaggcactgctgtaaaagcaaggtatccatagcagtggcaagtatcagttggaccatttgaaatcacaggtacgtggaccatttttaatatacaaaactggcattttcttatggctgcacctcatagttcagcatgtctggctcagtggtcagtggggaataaagggagtaacaggaaaataataggaactaaaggaggcaggaaagcagtacggggccggggccagaccggggcctccctcagttcagcagcaaggagtatgaacctgatgctgtgaagttttaaaacggagtagtatctgagtggtgttttttgtttttgtttttgttggagactgggtctcgctctgtcacccaggctgaactgcagtggcacagtcatggctcactgcagcctcggccccctgggctcaggtgatcttcccgcctcagcctcccaattagctgggactgcagatgagcacccccaccgccaactaatatttgtatattgggggaaattcacccccgatatttcacataggttcttttctatattccctaagtgtcagccggtctgagaaaagggacagagtacaaaagagaaattttaaagctgggtgtccagaggagacatcacatgttggcaggttccatgatgcccccctgagccataaaaccagcaagtttttattagtgattttcaaaaggggagggagtgtacgaatagggtgtgggtcacagagatcacgtgcttcacaaggtaatagaatatcacaaggcagtggaggcagggcaagatcacaggaccggggcaaaattaatattgctaacgaagttttgggcacgctttgtcattgataacatcttatcaggagacagggtttgagagcagacaaccagtctgaccaaaatttattaggcgggaatttcctcgtcctaataagcctgggagtgctatgggagactggggcttatttcatccctacagctttcaccataaaagacggccgcccccgaagcagccatttcagaggcctaccctcagggatgcattctctttctcagggatgttccttgctgagaaaaataatttagcgatatttctcccatttgcttttgaaagaagagaaatatggctctgttgtgcccagctcaccggcggtcagagtttaaggttatctctctcgttccctgaacattgctgttattctgttcttttttcaaggtgcccagatttcatattgttcaaacacacatgctctacaaacaatttgtgcagttaatgcaatcatcacagggtcctgaggcaacatacatcctcatcagcttatgaagatgacgggattaagagattaaagtaaagacaggcataggaaatcacaagggtattgattggggaagtgacaagtgtccatgaaatcttcataatttatgttcagagattgcagtaaagacaggcgtaagaaattataaaagtattaatttggggaactaataaatgtccatgaaatcttcacaatttatgttattctgtcatggcttcagccagtccctccattcagggttcctgacttcccgcaacattttttgtagacaatggggttttgccatctttcccaggctggtcttgaactcctggactcaagcaatctgcccccctcagcctcccagagaagccactgtgcccagccctgagtggtgtttttaaaaggcaactggtggccaggtgcagtggctcacacctgtaatcccagcactttgggaggctgaggcaggtggatcacctgaggtcaggagttggagagcagcctggccaacgtggccaaaccccgtctctgctaaaaatacaaaagttagccaggtgtggtggcatacacctgtaatcccagctactggggaggctgaggcaggagaattgcctgaacctgggaggcggaggttgcagtgagacaagattgcaccactatgctccagcctgggcaacagcaagactccgtttcaaaaaaaaaaaggccgggcatggtggcaggcgcctgtaatcccagctactcaggaggctaaggcaggagaatcacttgaaccgggcagcaaaggttgcagtgagccgagatcgcaccactgcactccagcctgggtgacagagcaagactgtttccaaaaaaaaaggtgaatttaaatctcaatggtgatactaataacagttctaacactcacagctagaaagtcacatacctacttggattttctgttacagtcctaaaccatgtatcacctatttgctccagaaaatatggtcaccataactttcctggctccagatgaaataactctcagtgactacagtgatgttactattcatgaacgataaaggtgtgagaatgataaaggcaggaaaatggtggccatcagtgataaagatatattctttaggatataagagtctggattaaggtctttggtgaatccgataggttttaagttatatctaagcaaagccttctgggtgtgttgagacaaattatcaaaggcagaggaggagctagtggaggcctttaaatacagtttagtccagccaggcacggcagctcatgcccgtaaccccaacactttgagaagctaaggtgagaggattgcttgaatctaggagtttgagaccagcctgggaaacatagtgagaccctgcctctacaaaaaataaaaaaattcgttgggcatggtggcatgggcccagtctaccctggatgctgaggccagaggattgtttgagcccaggagttcaagcttacagtaagctatgattgtgccactgcactccagcctggatgacagagaccctatctctaaaaataaatacataaacaaggatgaagatctttatgatgatccacttaatgaatagtaaatatattttccttaaaattttcgtaatttattgtaagaatacaatacatacacacaatatgtgtcagttgaccgtttgttatcggtaaggcctttggtcaacaggaggctattagttaagttttgggggagttaaaagctatatgtggattttcgactgctcaaagggatgggagcccctaatcaccagatgttgttaacaggttaactatttttttcttttttttttttttttttttttttttttggagacaaggtctggcactatcacccgggctggggggcagtggtgcaatctcagcttactgcaacctccacctcccgggcacgagttatcctcccacctcagcctcctgagtagctgggactacaggtgcatgccatcacactcggctaatttttgtattttctgtagagactgattcttgccatgttgtccaggctgatctcaaactggtgagctcaggccatcctcccacctcagcctcccaaagtgctaagattacatgtgtgagccactgcgcccagccagttgtattttttaagaatcaaggctgaggccgggcatggtggcttatgcctataatcccagcactttgggaggccgaggcgggtggatcacgaggtcaggagtttgagactagccttgcccacatggtgaaaccccatctcttacttaaaaatgcaaaattagctgggcgtggtggtgcacgcctgtaatcccagctactcaggaggctgaggcaggagaatcacttgaacccgggaggcagaggttgcagtgagccaagatcatgccattgcactccagcctgggcaatagagtgagacttcatctcaaaaaaaaaaaaaaaaaagaatcaaggctgtagtgtcaacttactaagtttcaaatatcaactgcatctcatagtacctttgtgaccttggataagttacgtagattctctctgcttgtctcctctgaaagtgtgggtaagccctaccttgtgaggctgtctgaaagacaagataatccatggaggagcatttagcacagcctgactgacatgtggtattaggttgaaccacgtgaaataggtcctcaaaaatactaaatgaactaggcgtttgtcctgccagagtacctgtgtacctgaagcacacacacggaaaaagtgaaaagcaagtattctcttaactggatatgctgaacatttattgaagacttaatgggtggaatgaattgtattaagggcatcccatctctaatttcaggagagtgaatctatctcttgagctgcctgataattcggtgcctccctcacaagagctcttccaggagttcacttcacaaatgtgtactgagttcccactctgtgttaaccagaatggttccagcgatgtctgcaggaaacaacgtctgcttggaggagttcagagggtactggagggaggaagcacagttggagctagacgctttcttcaggagcttacctgtaaagggcaagagagagatgatggcagttggaaggagatgtgggagccagtgttttttccttttctcttttagttgggaaagatgtcagtgtacttgtaggctgttaggaatgaaccaatagagagggaaaagatagatccagggggcaggggaggtgtaattaattacaggagtcaagaccaaatgggtgaggggaacacagaaccagccagagcttgggaggaggtgactttaaatatgaggctgggccgggcacagtggttcctgcctgtaatcccagtgaggtgggaggacggcttcagcccaggagttcgagaccaggttggtaagatgcartctaaaaaaaataagccaggcgctggtggcgcacacctgtaatcccagcacttcgggaggccaaagcaggtggatcacttgaggtcaggagttcaagaccagcctggccaacatggtgaaaccccatctctactaaaaatacaaaaaaaaaaaaaaaattagccgggcattgtggcacacgcctgtaatcccagctacttgaacctaggaagcggaggttgcagtgagctgagattgcaccactgcactccagcctgggcagcagagtgagactctgtctcaaaaaaaaaaaataaacagggcaggcacggtggctccgcctgtaatcccagcactctgggaggtcgaggcgggaggatcacaaggtgaggagttcgagaccagcctggccaatatggtgaaaccccgtttctactaaaaatacgaaaaaaattagccgagcgtggtggtgcacgcctgtaatcccagctactcgggaggctgaggcaagagaattcgttgaacccgggaggcgggaggttgcagtgagccaagattgcgtcactgcactccagcctgggcaacagagtgagactccatctcaaaaaaaataaaaataaaaataggctgcacgctgatgactcgtatctgtaatcccagcactttgggagagcaagagtgaaactttgtcccaaaaacatggttttttttgtttgtttgtgacaaggtctcactctgttgcccaggctggaatgcagtggttcgatctcggctcactgtaacctccayctcccgggctcaagcctcagcctcccgagtagctgggattacaggcatgtgccaccacgcccgactaatttttgtatttttagtatagacagagtttcaccatgttggccaggctggtctccaactcccgacctcaggtgatccacccgcctcggcctcctaaagtgctgggattacaggtgtgagtcacggcgcccagcctcaaaaacataaccttaaaaagaaatttttgagacagggtttcatcctgtcaccccggctggagtgcagtggagcctccacctcctcggctcaagcaaccatcccacctcagcctcccgagcagctgggactacagatgcgcaccaccactcccggtaatcccggtttgtttgttttttaawtttttaaataaacacgaggataagcggggatcgtggccctcgcctggggtccctgctacttcgcaggctaaggtgggaggatctcttgagcccaagagttcgaaaccagattgggcaaacctcgtgtcaaaaatatatgtgatagtcaggtcctccaggccgcaccctagatcacagggttgttgggatgatacaatatgaggtaaaagaacgtgaaattcacaccagagcgctcgaaagtgccaccctaatcgcaggcttcccaacctaatcgcaggcttcccaacctaatcgcaggtgccccaccctaaacgcaggcttcccaacctaatcgcaggcgccccaccccaatcgcaggctccccacactataatcagrcgccccgcccgccgcttcgacctggcgcatgcgtggtgcgcacgcgtcccgtctcctcggccracaagctctcgcgagacgagccgtgcaggctgaaaaaatggcgccacccagtaccckggagcccagggtcctgtcggcgaccagcgcaaccaaatccgacggrgagatggtgctgccaggcttcccggacgccgacagctttgtgaaggtgagttcgcggggcctcgggggtaccaggagtcgcccgcggccgccggaagccgactgggccctctgggcagccaatgcccgcccgccgtagtggagcccgagcgagggtcgcggggcccctgtccgcgctgggcgcagactctcctgcaccctccggggatggggcctcggaaacggacactgaggggcgtcccgcttgcgagcctaagtccatggaggcccaaatgtggaaagccgtctcgcatcctgggaaaggcttccttgccacccagacgtccctagcccttgcgacgtcgcgctcgccacgccctagccacccgaccagctctccgcaggggctcggcttcttcgcgctccccacacttgcctggagttgtctcctcccgcggccagtatggcccttctcttcctctgtttctgaagtccagtcctacataatttttaaccctgagttaaatgtcacctgttaaagccccattgcacgtttattagtaactcctggaaggtatacagggcgttcacttaagatctttgtataacttagcttaaatatgagcaaacgtacaactaggcttaaggtgtgcatagctcttacaaagcaatgaaactaaaataatttgtaaattaaccctataaatttacagaaattccactaacgttgtatcttatctaatttgctgttagctaatgctattgattcattaacatggctctcaatagttcctggaccactaactgtggtcctggttgtgtggcggtcatgctcataagctaccatgttcccctccgtgacttaatttcccacctcctttctctgcttttttcttgggaaatgtttattcacaaaactcacaatgacgttttaggccttcacatgatcagccatcatttatgtcacttcacggctttttttcgttacctcacaacagttaaaatagagaaccacttgacactaactgaacaataaacacaaatccagttttagatagtagctgttataaatttgtcgtccaaggatctaggataagcttgtattgtttttagatgctcatccagatgaaaacacaaaaacaaattcctgtagaaagctcttggatctgaacttgagtcgtaataataacgcttatgtgccaagaactgtcctaagtgcttttattagcttattcattctgtcctcacaaaaactctgtggtgcaggccctttttatttttcctgtttctcagaggagaacactaaagtccaaataaagcaatcacttgtccaagatctcagttaatacgtagcagagtcaagattcaaccccaggtatttgtgaatattaatcagattatatacgtatgtattctgtctctcaactctcccaagaatataagctccaaacttggtttcctgttcagtattgtattctcagggcctagattagattggggtttggcactaaatgagtgctttttttgatggatgaagagtagataccttgtatacgatagatcaaaaaaatgacataccaaatgaatggggatccctgtgtaaacatgccatcttttcttgtttttgacagtttgctcttgggtccgtggtggcagtcaccaaggcatctgggggcctaccacagtttggcgatgagtatgatttttaccgaagttttcctggcttccaagcattttgcraaacacagggagacaggttgcttcagtggtaagtactgtactttgttttcttgtgttagtgaaaagaaatgaaaacaaagaagtagataaatttttcctgaaatttatttttccttaaacattttctgtggtatgaagagctataaaatgtgaaaattgaagcaatggattttgattagggaaatattacttggtatatttttagtttagcctttaaaaaatgtaytgacttttgtactgaaaaaatatattgacttttgtacaaatcttttttaattaaatgggacgtgaacacttagagccaagattcttttttttttttgagacggagtctcgctctattgcccaggctggagtgcggtggcatgatctcggctcactgcaagctccgcctcccaggttcacgctattctcctgcctcagcctcctgagtagctgggactacaggtgcccgtcaacacgcccagctaattttttgtatttttagtagagacagggtttcaacatgttagccaggatggtctcgatctcctgacctcgtgatccacctgcctcggcctcccaaagtgctgggattacaggcgtgagccaccgcgccttgccagatccaagattctttcccacaacttgtagagtagcaggtatttttatttttatttttattttttttgagatggagtctcgctccatcacccaggctggagtgcattggctcaatctcggctcactgcaacctgcgcctcccaggttcaagcgattctcctgcctcagcctcccgagtagctgggattataggtgtacaccaccacgaccagcttttttttttttgttgggggggagtacggagtcttgctctgtcgcccaggctgaagtgcagtggcgtgatctcggctcgcagcaacctccacctcccaagatcaagcgattcttgtgcctcagcctccccagtagctgggataacaggcatgtacgaccattcccggctaatttttgtatttttagtagaggaggtttcaccatgttggccaggctggtctcgaactcctgaccttgtgatccacccacctcagcctcccatagtgttgggattacaggtataagccactgcgcctagccagttttttgtatttttagtagagatggggtttcaccatgttggccaggctggtctcgaagtcgtgaccactcctgaagtgctaggattacaggtgtgagccactgcgcccagctagggtgcaagttttattggtttcatcaaaaagtatcaggggccagacatggcggctcatgcctgtaatcctagtgctttgggaggcaaaggcagaaggatcgcttgagcccaggagttcaagaccagcctgggcaacgtagggagactccatccctacaaaaaatttttaaagtagctgggagtggtggtgcaccactcccaagtcacagctacttgggaggctgaggtgggagtatcacttgagcccaggagttcaaggctacagggagctgtgattgtactgctgcattccagcctgggtaacagagcaagaccctgtctctttaaaaaaaaaaaaaaaaaaaaraaagaaagaaagaaagaaaaaggctgggctcatggctcacacctgtaatcccagaactttgggaggccgaggcaggtggatcacttcaggtcaagagttcgagaccagcctggccaacgtggtgaaacgtcatctttactaaaaatacaaaaattagccagacctggtggcgtgtgcccataatcccagctactcaggaggctgaggcatgagaatcgcttgaatccgggagtcggaggcaggcagatcacttcgggtcaggagttcgagagcagcctggccaacatggcaaaacctcatctttactaaaaatacaaaaattaaccagacctgttggcatgtgcctataatcccagctactcaggaggctgagacacgagaatcgcttgaacccgggaggttgaggttgcagagagccaagatcatgccactgaactccagcctgggcaacagagcaagactgtctcaaaaaaaaaaaaaaagatgtgttgggaacagtctgagccacatcatttgaacattctctctcacagaatgtaaacaagtgaaataaaaatctacaagctaaccttggttttcctttccttagcatgagcagagtaatgcagtaccatgggtgtcgcagcaacattaaggatcgaagtaaagtgactgagctggaagacaagtttgatttactagttgatgccaatgatgtaattctggagagagtggtgagtattttcccttactcttttttttgttttgttttgtttttgagacrgagtctcgctctgtcgcccaggctggagtgcagtgatgcgatctcgactcactgcaagctctgcctcccgggttcacaacactctcctgcctcagcctcccragtagctgggactacaggcgcycgccaccacacctggctaatttttttgtatttttagtagagacggggtttcaccrtgttagccaggatggtctcgatctcctgaccttgtgatccgcccgcctcagcctcccagaatgctgggattacaggcgtgagccaccacacccggccttcccttactcttatggtaactaacaaagagctttgtattattaaaatatacggatagacagagcaacccaggcaccttagaaaatgaaaaggaaataagcttaacatttcttataataacattcccttctaatagttggtatattttttctaaaaaataattacagttgtcttaaaaatattactgccccatggaagcttcttttttttttttttttttgagacggagtcttgcttggttgcccaggctggagtgcagtggggcgatgttggttcactgcaacctccacctcccaggttcaagcgattctcctacctcagcctccggagtagctgggattacaggcacccaccactattcctggctaatttttgtatttttagtagagacatcgttttgtcatattagccaagctggtctcaaactcctgacttcaagtgatctgcctgtcttggcctcccaaagtgctgggattacaggcgtgagccacctcactgagcctgaaagcctgtttttaaagtgccttattccagccaggtgtggtggctcacacctacaatcccagaactttgggaggccaaggcgggtgatcacctgaggtcaggagttcaagaccagtctggccaacatggtgaaaccccgtctctactaaaatataaaaactagccaggccatggtggcacacacctgtcattccagctattcaggaggctgaggcaggagaatcgcttgaacccgggaggccaaggttgcagtgagccgcgatcatgccactgcactccagcctggatgacagtgagactctgtctcaaaaaaaaaaaaaaaaaggtggcctggcatggtggttcacgcctataatcccagcactttgggaggccgaggtgggtggatccacctacctgaggtcaggggttcaggagcagcctggcggacatggtaaaacactgtctctactaaaaatataaaaaattagctgagtgttgtggtgggcacttgtaatcccagctactcaggaggctgaggcaggagaatcgcttgaactcgtgaggcagaggttgcagtgagccaagattgcaccattgcactccagcctgggcatcaagagtgagacgccatctcaaaaaaaaaaaaaaaagttaaagtgccttattctggccagggtcagtggctcactcctgtaatcctagcactgtaggaggccgaggtaagaggattgcttgagctcaggagttccagaaccagcctgggcaacatagtgagaccttgtctttatttaaaattaataaataaataaagtgccttattctgaatctgtcttccagatctgcaaattctgtttttatttttttggatactgaagtcttgctctgtcacccaggctggagtgcagtggtgcaaccataactcactgcaaccttgaactcctgggctcaagcgatcctcccaccacagcctcccaagtagctgggactgcaggtgtgcaccaccacgtctggctgaatttttttttattttatagagacaatgtcttgctgtgttgcccaggctggtcttgaactcctcaaacaatcctggcctcaaacaatccccccccacctcagcctccttagtcactaggattataggcatgagccactgtgcctgacaagatttgcaaattctatttgtgttgcaaaagaagaggcatttatatcacccaaccaaaatttagtttatttgtaccgttactcaaaatctactgaaccccctccagctcacaggattggaaggagatgtgtattattctgtcttgcttactatctatttatgcctaattctatggcagaacgttatttccacagaaatacatagagatcatggaaaacaaatctgacttcaaccatctgacagtcctgaaaatatttaaatcatgccctcctgtcccatgaagtcatctcttccctagtctaaatgcctacaaatctttcagcagtttctggtatattgtgatttcaagtcctgccataatcctatgtgtcacctggttgtgcctctgttagtagtgcccaagctgatatttcacgtctgctttaaagtgcaaaatagatgaggactccctgcagtttcattctaaatagtgtacttctatatttaatgtatgcagtccagggacttcttagttattttagtggccacattacactgttaaatcatattagaattttcagcccaattcagagctttaaagagtcaatcgagtattgggcatgggtaattactgtcctacctgcctttgagcaaataatgcattaattacttggcatgacatactaatgacctttattgatcaactttgtaaaatttttatttttttattgacaaaaattgtataggcgatcatttacatggttatgtctcaataaacctatattataagtcaaaaatgcatttaatacacctcacttaccaaatagcttaactgaacctgctttaaatgtgctcagaaaacttccattagtctacagttgggcaaaatcttacacaaagcctatttttataatacagtgttgaatattcatctcatgtaattcaagtagcattgaatacacttctgaaagtgaaaaacaggttgtggccgggcacagtagctcatgcctgtaatcctagcattttgggaggccaaggcaggtggatcacttgaggtcaagagttcaagaccagcttggtcaacatagtgaaaccccatctctactaaaaaatacaaaaattagctgggcgtggtggcgtgcacctgtagtcccagatactcgggaggctgaggcatgagaattgcttgaacccaggaggcgaagactgcagcaagctgagattggaccactgcactccagcctgggcaacagagtgagactccctctcaaaaaaaaaaaaaagaaaaacagggccaggcacagtggcttacgcctgtaatcctagcactttgggaggtcgaggcaggcagctcacaaggtcaagagatcgagaccatcctggccaacctggtgaaaccctgtctctactaaaaatacaaaaattagctgggcgtggtggtgcatgcctgtagtcccaattacttgggaggctgaggcaggagaatcgcttgaacccgggaggcaggttgcaattagctgagatcacgccattacacttcagcctggcaacagagcaagactctgtctcaaaaaagaaaaaagaaaaacaggtggtaagtgtacttgaaatatggattctactaaatgcaaatcactttcacatcattgtaaactcaaaaacttacaagtcaaactgtcatacattggggaccatctatatatttattacatacaacttgatgttttgatacatacattgatctgttcttatatatgtatattttcttacacaaatgtctctgaataccaatctctttaaaatgttaggtaattaggtggggcacggtggctcacgcctataatcccagcattttgggaggctcaggtgggcggatcacttgaggtcaggagttcgagaccagcctggccaaccgggtgaaaccccatctctactaaaaataaaaaattagccaggtatggtggtgcacacctgtaatcccagctactcgggaggctgaggcaggagaatcgcttgaaccctggaggcagaggttgcagtgagcccaattcagaactgtaaagagttgcagtgaggcaagatygcgccactgcactccagcctgggtgacagagtgatactccatgttaaataaataaaatgttaggtagttaactctgctaacctcaaaaggaaaaatgcttaaccagtacctcttctactcttagggtattttactggatgaagcctcaggtgtaaacaagaatcaacagcctgtcctccctgccggcttgcaggtccccaaaacggtagtgtccagctggaaccgtaaggtgagggcttttcagattaactagagctcttgatgtcagcttcataacagagattttgctcattctaacrtgcatttctgttctaatttattagagaactggccactgtctcctttagtttgttctcataaacatacacaaactaattacaccctcttcttctctttctggagacctctacatgcacatacattcttaaatgaatgaatgacctttgcgatgttcttgtctcctcrgaagtcataaattggaatttacttttctaattcatcaagttgctgtgttataaagtatttgtattcattgatcataggcagcagaatatggcaaaaaagcaaaatctgaaactttccggctgcttcatgcaaaaaatatcatccgacctcagctcaagtttcgagagaagattgacaattccaacacaccatttcttcctaaaatcttcatcaaacccaatgctcagaaacctctccctcaaggtaaatagtgcatactttgcctgtgtttgagtctcactttatttgatgcaaaaaccaggaagggtgtacaggtctctcttctttgttcaaagggagcccaccctcctttgttcaaagggagcccagttcagctattccagaggctgaagtgggaggatcacttgagcccaggaggtcaaggctacagtgagctgtgcttgtgccaccacacttcagcctgggggacagaacatgaccctgtctcaaaaaaaaaagccaaaaaacaaagggaaccagtttacccctgtgtaattagaaaagacatgaatgtgctaatgatgtttttgtcactgctgggatccccagctctctctaaggaaaggcgggaacgcccacaggatcgtcctgargacttggacgtcccccctgcactggctgatttcatccatcagcagagaacccagcaggttgagcaagacatgtaagtgttggcctgtgtctgactttctgccgtgagtacttacctttttgccacattttcacttttgtggagtatatacatgaaaacaatctgaggagtagtgatttcctccttacaccccaacctgggccttagcaataaaacctgctgtttgtgttcacaaagggcctacacagcattgcctcatgtaaacctcactgcagtcctgagaagtagcagttgctcttattcccattttatagatgtaaaacacgaaggctgggcgcggtggcttacgcctgtaatcccagcactttgggaggctgagaccggtggatcacctgaggtcaggagttcgagaccagcctggccaacatggtgaaaccccatctctactgaaaatacaaaaattagccaggcgaggtggtgtgtgcctgtaatcccagctactcgggaggctgaggcaggagaatcgcttgaacttgggaggtggaggttgcagtgagccaagatggcgtcrctgcactccagcctgagtgatagagtaagactccatctcaaaaaaaaaaaaaaaaaagatgtaaaagcaaaattagagatgcaggcttcttgtagagttggaacttctttgagacagggtcttgctctgtcgcccagactggagtgtggtggcatgaacacagctcactacagcctttacctcctgggctcaagtgatcctcctgcctctgcctcccaagtagctgtgaccacaggcatgagccatcatgcacagctaatttttgtattttctgtatgcccagtctggtcttgaatttctgacctcagccatcctcccaacctgccctcccaaagggttgggggttgggattacaggcatgaaccactgtgcctggccagagctggcccatgttttctttctttctttctttctttctttttttttttttttgggacggagtttcrctcttgttgctcaggctggagtacaatggcgcgatctcagctgactgcagcctctgcctcctgagttcaaatgattctcctgcctcagcctcccaagtagctgggattattataggcatgtgccaccacacctggctaattttgtatcttttttttttttagtagagacagggtttcatcatgttggtcaggctggtctcgaactcctgacttcagttgatccaccctccttggcctcccaaagtgctgggattacaggcccgagccaccgcacccagccccatgttttcttaaatttgtctttcctccatactatactgctctgcctttcttattaggattcaaatagtaggtaaggctcacttttttttttttttttttttttagttttgctctgtcacccaggctgggtgccgtagtgcaatcatagctcactgtagccttgaaccctggggctcaagcaatccccctgcctcagcctccctagtagctgggactacaggcacacatcactgtacctggcttgttttttaattttagtttttatttttgtaaacacagggtctttctgtgttgtccaggctgcctgaaactcctggcctcaagcagtcctcctgcctcgactttccagagttctgggattacaagcatgtgccaccgtgctcagcccaaggctcatttatgaatttagtaaagaaaaggcattttttactggcaatataagcatcttggaaaaacttcacttaaaatagacaaatggactttgcctttaatataatgcaaaaaggtgataaaaatttggttagtattggccttttcctcacatagagccagagtctgtctgggcattcatgcctttagccccagctctgcaatgtgaggccacaagctaagtgctggagaaayaaaggccatgaaaggcagccctgccctcctgggctaccgtgatcctcgaggaacacaccacaagttgaggatttttatacagatttcttaggatcagaaaaaatataacattaagctcttggccaactgcagtatttgcttcatccttactttacagatttgttatttcaaactgcaagaatgacatatttctcattttggtattatccacaacatcaactatacagtactttgcaaataagtactcaaatctttataaagctgcttgggtctccagctctctaaagaaattaatagacttaattatcatattttaagagtgagcaaatatcatctgatttatgatttgtagttgaattactgaaataagctctttgtaaagggaagatattttcacagtggtcttttctcatttgtttttacagattggataaaaggcattatttttcccttgaatcatggaattaatcagaatgatttctctttttgttttatttactcaggtttgcacatccttatcaatatgaactaaatcactttaccccagcagatgcagtgcttcaaaagccacaaccccaggttagtacccagccttagtttaaaggtgccgtgtagtagcccaagaggaatcaaataagtagattcattgatgcaattttgactttccttgaagatctttaagggagaaagttacagttttgggtcatttctcaaacttgtagttcactttgtactttactgggggatgatttctatattcctccctttttcttactattctcttgatccagttatacagacctatagaagagacaccatgccatttcatatcctccctggatgaactcgtggaactcaacgaaaagctcttgaattgtcaggaatttgcagttgacttggaggtatcttataaatgaccctgggtaaaatttttacatttttctgtgagttcacctgttggagaagtataaaattaatactaattgtaattttttttggtaaaaaattaatcatataacttagctttgtagctgacttttcaaaatcagtaaaggaaagtctaatataatctttgtttttcctcttctcccctccttctgtggggtttagcaccactcttacaggagcttcctgggactgacctgcctgatgcaaatttctactcggacggaagacttcatcattgacaccctcgagcttcgaagtgacatgtacattctcaatgagagcctcacagacccagccatcgttaaggtcagccagccttttgtaactcatgcatgtgagctcatacaagatttttagtgcttttcagtgtactatttcattatttcaacctagaccagtcaagttgggaggaatcatgtcatttcctaactagggtacagtgctaaatggcttttgtttctaaatccctgttagaacagctaagacttagcttgttaccgcccagaaaaacgttaaatcattttaatgactactgcagtgagccccagccatcaagattgtttggacttgatgactgtactgaagctactagagctgctttcatgtgtctcattggttgataacagtttcagacttcaagcgtatggaatcaggagtgtagaaagctgtgactgaagacaaaagaaacatttaaaactgcatatatcctttcaaaaaaccagctcctggattcattaattttttgaagggttttttgtgtctctatttccttcagttctgctctgattttagttatttcttgccttctgctagcttttgaatgtgtttgctcttgcttttctagttcttttaattgtgatgttagggtgtcagttttggatctttcctgctttctattatgggcatttagtgctataaatttccctctacgcactgctttgaatgtgtcccagagattctggtatgttgtgtctttgttctcgctggtttcaaagaacatctttatttctgccttcatttcgttatgtacccagtagtcattcaggagcaggttgttcagtttccatgtagttgagcggttttgagtgagtttcttaatcctgagttctagtttgattgcactgtggtctgagagatagtttgttataatttctgttattttacatctgctgaggagagctttacttccaactatgtggtcaattttggaattgatagaccgctagcaagactaataaagaaaaatagaagaatcaaatagacgcaataaaaaatgataaaggggatatcaccactgatcccacagaaatacaaactaccatcagagattactacaaacacctctacgcaaataaactagaaaatctagaagaaatggataaattcctcgacacatacactcttccaagactaaaccagaaagaaattgaatctctgaatagaccaataacaggagctgaaattgtggcaataatcaatagcttaccaaccaaaaagagtctaggaccagatggattcacagccgaattctaccagaggtacaaggaggaactggtaccattccttctgaaactattccaatcaatagaaaaagagggaatcctccctaactcattttatgaggccagcatcatcctgataccaaagccgggcagagacacaaccaaaaaagagaattttagaccaatatccttgatgaacattgatgcaaaaatcctcaataaaatactggcaaaccgaatccagcagcacatcaaaaagcttatccaccatgatcaagtgggcttcatccctgggatgcaaggctggttcaacatacgcaaatcaataaatgtaatgcagcgtataaacagaaccaaagacaaaaaccacgtgattatctcaatagatgcagaaaaggcctttgacaaaattcaacaacgcttcatgctaaaaactctcaataaattaggtattgatgggacgtatctcaaaataataagagctatctatgacaaacccacagccaatatcatactgaatgggcaaaaactggaagcattccctttgaaaactggcacaagacagggaggccctctctcaccactcctattcaacatagtgttggaagttctggccagggcaatcaggcaggagaaggaaataaagggtattcaattaggcaaagaggaagtcaaattgtccctgtttgcagatgacatgattgtatatctagaaaaccccattgtctcagcccaaaatctccttaagctgataagcaacttcagcaaagtctcaggatacaaaatcaatattcaaaaatcacaagcattcttatacaccaataacagagagccaaatcatgagtgaactcccattcacaattgcttcaaagagaatgaaatacctaggaatccaccttacaagggacgtgaaggacctcttcaaggagaactacaaaccactgctcaatgaaataaaagaggatacaaacaaatggaagaacattccatgctcatgggtaggaagaatcaatatcgtgaaaatggccatactgtccaaggtaatttgtagattcaatgccatccccatcaagctaccaatgactttcttcacagaattggaaaaaactagtttaaagttcatatggaaccaaaaaagagcctgcatcgccaagtcaatcctaagccaaaagaacaaagctggaggcatcacactacctgacttcaaactatactacaaggctacagtaaccaaaacagcatggtactggtaccaaaacagagatatagatcaatagaacagaacagagccctcagaaataacgccatatatctacaactatctgatctttgacaaacctgacaaaaaacaagcaatggggaaaggattccctatttaataaatggtgctgggaaaactggctagccatatgtagaaagctgaaactggatcccttccttacaccttatacaaaaatcaattcaagatggattaaagacttaacaacgttagacctaaaaccataaaaaccctagaaggaaacctaggcaataccattcaggacataggcatgggcaaggacttcatgtctaagacaccaaaagcaatggcaacaaaagccagaattgaccaatgggatctaattaaactaaagagcttctgcacagcaaaagaaactaccatcagagtgaacaggcaacccacaaaatgggagaaaatcttcgcaacctactcatctgacaaagggctaatttgcagaatctacaatgaactcaaacaaatttacaagaaaaaaataaccccatcaaaaagtgggtgaaggacatgaacagacacttctcaaaagaagacatttatgcagccaaaaaacacatgaagaaatgctcaccatcactggccatcagagaaatgcaaatcgaaaccacagtgagatatcatctcacaccagttagaatggcaatcattaaaaagtcaggaaacaacaggtgctggagaagatgtggagaaataggaacacttttacactgttggtgggactgtaaactagttcaaccattgtggaagtcagtgtggcaattcctcagggatctagaactagaaataccatttgacccagctatcccattacttggtatatacccaaagggctataaatcatgctgctataaagacacatgcacacatatgtttattgcggcactattcacaatagtaaagacttggaaccaacccaaatgtccaacaatgatagactggattaagaaaatgtgkcacatatacaccatggaatactacgcagccataaaaaaggatgagttcatgtcctttgtagggacatggatgaaattggaaatcatcattctcagtaaactatcgcaagaacaaaaaaccaaacactgcatattctcactcataggtgggaattgaacaatgagaacacatggacamaggaaggggaacatcacactctggggactgttgtggggtggggaaaggggggagggatagcattgggagatatacctaatgctagatgatgagttagtgggtgcagcgcaccagcatggcacatgtatacatatgtaactaacctgcacattgtgcacatgtaccctaaaacttaaagtataataataaatttaaaaaaaaatttttttaacttaaaaaaaaccctgcatatatctaatttttttttttttttttttttttgagacggagttttgctcttgttgcccaggctggagtacaatggtacgatctcggctcactgcaacctctgcctctcgggttcaagcaattctcctgcctcggcctcccaagtagctggggttaaaggcatgcgccaccacacccggctaatttttgtatttttagtagagacagggttttgccatgttggtcaggctggtctcaaactcctgacctcaagcaatccacccaccttggcccaaagtgctgggattacaggcgtgatccaccatgcccagctgcatatatctaatcttgattagaacattggcttcagccaggtgaggtggctcaggcctgtaatcccagcattttggggagctgaggcaggaggatcacttgagcccaggagattgagaccagcctggggaacatagtgaaaccccgtctctacaaaaaataccaaagtttagctgggcgtggtggcacgctgtagtcccaactacttgggaggctgaggtgggaggattgctggagcatgggaggcggaagttgcagtgagccaagatcacaccactgcactacagatgggacagcggagactaccttctaatttcagtgttctaataaactagaggcagagttaatttctgagcatgagtggcctgctaccagtgtactgcatgactttggttctgttttcaggtctttcatggtgctgattcagacatagaatggctacagaaagactttgggttgtatgtagtaaacatgtttgatactcatcaggcagcacgccttcttaacctgggcaggcactcactcgatcatctcctgaaactctactgcaacgtggactcaaacaagcaatatcagctggctgattggagaatacggtcagtttgctcttactgaggaaatgtgggtggcagaagaaagtgattattcattaacctgtcgtccagagagacctgggtttgagccctaccacgctcattgagatgaatggcatcaggcttttcgccaggcatcttcagcagcgtaaaagtggtaggaaattttttaatgctaaggtggactttatgatgggctgatgcagttacactgtgttccatggaaatagtggttgaaaaagaggtgccgcaccagtatttgcccatgctggtcttttgtttgaaactgggatctttctaccagatgattttgtgtgtgtgtaagatcttctgtagggatgattgtgtgtgtgtgtgtgtgtgcaagatgaccttccataggtgggaaagaattctaagggacactgttgtttagctttacactgagcgtttttttgtggcataaggtagcagttttgccccacttcctgcaggccttgctcagcttggtcgttttccgcttggttgctacctctccgaggttgcacctgtcataggaaggtgctactgagctttttcaggaattccacatgccagaatgccagaatttctttttttctttttttttttttgagatgcagtttcactgttgcccaggctggagtgcaatggcgcgatctcggctcaccacaacctctgcctcccgggttcaagcaattctcctgcctcagcctcctgagtagctaggattacaggcgtgcaccaccacgcccagctaattttgtatttccagtagagacgaggtttctccatgttggtcagactggtctcaaactcctgacctcaggtgatcctcccgcctccgcctcccaaagtgctgggattacaggcgtgagccaccgcgcctggcccagaatgccagaatttctaaatataaaagtaaaattacatttggactgataaaatccaaataaaagataaaaattgataaaatctaaaaaccactccctgttacggagcccttaccctgtgccaagctctgggctaagtgcttcaaggatgtggtcctgtgtagtcctcacaacagcctatgaagtacctggttcccatttcacaagttaggtgggtcagcccaaagaggttaaggaacttgtccaaggacagacatctggagctgagatttgaactcaggacaccagtggccccttttctactgcctcttgtgtgtgtccagagtagctgacagtgcccttattttaaccaccgcattaccctgcctccaattctacccagctgttaaaataatggtttatcatgttaaaatgcaggaaatgttggcataactgcagtattgactatgaaaggatctttcatattggaagggtctaaggaagtcccagcacccaaggaatagacaaattgaattgctgtccttgggggcaatcagtaaaacattgtcctctgcaattccagccctctgcccgaggagatgctcagctacgcccgggatgacacccattacctgctatatatctatgacaaaatgaggctggagatgtgggagcgcggcaacgggcagccsgtgcagctgcaggtggtgtggcaacggagcagggacatctgcctcaaggtacacctcagccgcagtcacacagaccgcgacactygggctctgtgtctggccaggttctagttcttaggtttgctccttacattcatgaaaagagccaaacattttscagagcccagggcacaattttgattcccgttgattttgaatgttctctaatactttgtagaaattcatcaaacctatcttcacggatgagtcctaccttgaactctataggaagcagaagaagcaccttaacacacagcagttgacagcctttcagctgctgtttgcctggagggataaaacagctcgcagggaagatgaaagttacgggtaagggattagaggttcttttaatacttgtttccagactgaggagatctaataacaagtaaataatgggcttttttcttttgctatgaaagctggttatttcccctatgtgacagcatctaatggaacttactggctgaatgtaatgtgtccccaccgtgtgtgtgtgtgtgtgtgtgtgtgtgtgtgtgtgtttktktttttttccagatatgtactgccaaaccacatgatgctgaaaatagctgaagaactgcctaagtgagtttcaaatctgattaatatgttctgactttctcagtagatctgatgttcttcaaaatcaagcttttctggttgctattacccaaggctgcttactcagagattaatgctccaagcttggaaggtagcaagttgaaggaatatagaatttctgccctcaggctgccatttaagcactaaaacttctgaactggaatcatttcaatgattatgccttagtttgagtttattttaagtctctgagccttatagcatctacttgcaagggaagaaaatgtcccagattctgtcatctgtactttcttccaaattaaagcagctcatgatcttaaacgttttgtgatcttgattgaagtataagcaagaatgaaaatccacagcccgttggttgccccctgcggaattgagaatccacagtgctrtggcacttactttcagctctccctgattgtgggagtcaggctccaagagggatccacttaaagcttggtgtcgcaaagaacacatggagaagttggcctaggctggcctgacatcagtgtttccttagtcacctacctgtagcttcagcttaggtggcagcctggctttacccagtcattattcttatctggaagcctttaagggctgcgtttctgagtgacaagttgagtgtgttcttacttgtcttcagggaacctcagggcatcatagcttgctgcaacccagtaccgccccttgtgcggcagcagatcaacgaaatgcaccttttaatccagcaggcccgagagatgcccctgctcaaggtaagaagcttttctgcggctgggcacagtggctcacgcctataatctcagcactttgggaggctgaggtggctggatcatttcaggtcaggagttcgagaccagcctggccaacatggtgaaaccccgtctctactaaaaatacaaaaaattagccaggcgtgtggtgcacrcctgtaatcccagctactccggaggctgaggcaggagaattgcttgaatccgggaggcggaggttgcagtgagccgagatcgcgccactgcactctagcctgggaggcagagcgagactccgtctcaaaaaaaaaaaaaaagattttctactgaagggtcccaacttagcaagcctgttttttttttgtttgtttgttttttgttttttttagacggagtctcgctctgtctccaggctggagtgcagtggcatgatctcggctcactgcaacctccgcctcctggattcaagcagttctcctgactcaacctcctgagtcgctgggattacaggcatgcaccaccacgcctggctaattttgtatttttagtagaggcggggtttcaccatgttggccaggctggtctcgaactcctgacctcaggtgatccaccacctgggcctcccaaagtgctgggattacaggcgtgagccatcatgcccaactttagcaggcctgttttttctgctagtgtcttattccttgtggcttcctagattcatgagctggtctgcattctaaacaaccctagggaaataatagggcttaggaaatccagtgtgtgtgtcttgatgaatttagctgcttttttttatgatagttgagagctaagactctttatttatgaccttagctttgatgattcagcagcaagtactgtctggtaactgggccaattcactgttctaaggcagttaatgtggtggagtgagatggagcggtgacctcagcagagggagctagttttgggagcctggcgatggcccagatgtgaagtgatagctccctgaatgagtgaggaatcacacactgagaaggaaagaacaggtgtaggaagcatcagaagaaaagattgatgagacttcgtagcaaatgctgacaatggcagccagttttcttttgttttttttgttgttgttgttgttttgaaacagggtcagccgggcgcggtggctcacgcctgtaatcccagcactttgggaggccgaggcgggcggatcacgaggtcaggagatcgagaccatcccggctaaaacggtgaaaccccgtctctactaaaaatacaaaaaattagccaggcgtagtggcgggcgcctgtagtcccagctacttgggaggctgaggcaggagaatggcgtgaacccgggaggcggagcttgcagtgagccgagatcccgccactgcactccagtctgggcgacagagcgagactccgtctcaaaaaaaaaaagaaacagggtcttgctctgacacccaggctggagtgcagtggtgcaatcatggctcactgtagcctcgcatctgctaggctcccaccttagcctcctgagcagctgggaccacaggcatacaccaccatacccagctatgttttttttaattttttgtagagatgggtcttgctgtgtttcccagactggtcttgaacccgtgggctcaagcagtcctcccacctcagcctcccaaagtactggaattacagttgtgagccacctgccagccccacatttgcaatttttgtgttaaaaatgtctttgtaagctctgtactttgtccaagtaaagagagaccttgattactagagaagagtctttttcaagctctttggaatccttcctattgtgcttagtcatgttaaagagctttattctttcattctacaaataattattgagcaccaaataattatcatgccaggcactgtaaggagtgaagagaggaaagaaaatctctgggcttttgagaaacaggctggtgaaggaatacagtcagcrctggagactgggggttggacttgaggtgcttgggcaactttcctcaattcccttcgtttttttccttagtctgaagttgcagccggagtgaagaagagcggaccgctgcccagtgcygaggtagagtgtcggatctgttttctcccccrggagggaaaacgtcaagtcacagccagtgcaagtacacctctgacagaggcctgtgctgacagctggcagaaagctactgccggcttgcacgttttacatgccagcctgctggtgtcttttaatgcagagattggagaatgttctctttggacctcacgactgctcccatgcccctccggatggctatccaatcatcccaaccagtggtaaagtcgagagccctcctgactgtcccgaagaggttgggacacagctaccttgtctaaaattctgtaggcttggccgggcgtggtggcttatgcctgtaatgccagcatattggaaggctgaggyrggtagatcacctgaggtcaggagtttgagaccagcctggccaacatggtgaaaccccatctctactaaaaatacaaaaattagctggcatggtggtgggcrcctgtaatcttagctacttaggaggcagaggcaggagaatcacttgaaccgaggasgcggaggttgcagtgagccgagattgtgccattgtactccagcctaggggactacactaaaactccatctcaaaaagaaaaaataaacaaaattctgtaggctttgaccttactatcttctgctcctctaggatctgtgccagttcagaagcaggcgagcctcttccctgatgaaaaagaagataacttgctgggtaccacatgcctgattgccacagctgtcatcacgttatttaatgtgagtagcacagaaacttcactgaggtgatgaggaccccctgggatttactggatttattcagcaggctgtctgcctggagcattgcatacactcggagactaatgctgagagcaaaacccagcagtgctgggagaggcatagagaccaatgagcaaggtggcactgaccactctggaggaggtggtctggggacgtggatgggggattctcttgagctctgtgtgaagaaatcttccaggaaaggctgacgtcctgttgttgaacagcacctagtgggaggagggcctgcgctaagagaacatacaagcagggctttccagacaagctgcagtggtggtggaggaaaaacggttcacctggatgcccagcaggggtggcatgggtgtactgtccgatgaactgtagaatgtgcgctgcccatagcttcctgcctgaccccagcaccacatatgtgtgctttcagtgaagaagagaaatgattttttttttttttgagacaatcttgttctgccaccaaggctggaatgcagtggcacaatcatggctcactgcagccttgacttctgaggctcaaacgatcctcctgcctcagcctcctgagtagctgggattacaggcatgagtcactgtgcccagctatttcactttttttgtttgtttggtttggttttttgagatggagtttcgctcttgttgcacaggctggagtgcagtggcatcatctcggctcactgcaacctccacctcccaggttcaagcgattctcctgcctcagcttccctagtagctgggattgcaggcgcccgccaccatacttagctaatattttatatttttaatagagatggggccactatgttggccaggctggtctcgaatgcctgacctcaggcgatccacccacctaagcctcccaaagtgctgggattacaggcatgagccaccacacccggcattttttttttttttttttttttttttttttgtgacaggatctcatcctgtcacccaggtgggagtgcagtggcaccatcctggctcactgcaacctctgcctcctgggctcaagcaatccctctgccccagccttctctcgagtagctgggactacaggtgtatgccaccatgcccagccaatttttgtatgttttgtagaggtggggtttcaccatgtcgcccaggcttcactttggtttttaacttaattacataaatctagattgggccttgctttagcaattaatgagaaaatactaggcgctttagctgacctcagagctaatttgagtcatgaagatgatttagcagctaagcgtgttagcatgagctctgggctgctttgatacggaagtgctgtttggtgtaaaggaggctgtggtctccctgcactcttgtgttgcaagggcgcataattacagatgaagcaaaaggatagcacatatttatgaacccagttggaagcagcattttgttgcataatttcaatgattccctataaagatatgtaatactaaatttcaggcctggcgtggtggctcacacctgtaatcccagcacttttggagggcaaggcgggcatatcacctgaggtcaggagtttgagaccagcctggccaacatggtgaaaccctgtctttaattagccgggcattgtggcgcacgcttgtaatcccagctactcgtgaggctgaggcaggagaatcacttgaatccaggaggcggaggttgcagtgagcagagatggcaccactgcactccaacctgggcaacagagcaagactccactcaaaaaaataatacatacatacataaaataaatttcaggcatcaattaagacctcatgttctagagccagaccatggtgggtttagatccttggtctgcttgtattcactgcaagcctctgaaagactgtcacaacctctgtaggcctcagtttcctcctctgtaagatggtgagagtaataccacctcataggctatgaggacatgctgagaattcactgatccagcacattgatattgaaatgctactgtgtgctgttgcagacacaacaccttatacataagagagtgtatgaaaaattagccttagccattggtattaatatcactgttactggccgggtgcgtgcggtggctcacacctgtaatcccagcactttgggaagccaaggcgggtggaccacttgaggtcaggagttcaagaccagcctggccaatatggtgaaacctggtctctgctaaaaatacaaaaattagctgggcatggtggcacgtgcctgtaatcccagctactcaggaggctgaggcaggagaatcgcttgaacacaggaggtggaggttgcagtgagcagagatcacaccactgtactccagcctgggcaaaagagcgagactctgtctccagaaaaaaaaaaaaaatcactgttaactgttgctctcttgcttgcatcttgatgtcacagatgatcatggtcattagtgatcgttttttgtctgtccctgcaggaacctagtgctgaagacagtaaaaagggtccattgacagttgcacagaaaaaagcccagaacatcatggagtcctttgaaaatccatttaggatggtgagtagtagttttgtcagggctgacaggatatgcagagatgcctacagctgtacatgcttttacctgggaaggaagcctctgaagccagtgtgtcggctgccctggtgtcctggcaaagacgctgacamggcaccagcaaccccccatctgagcgcttctgccccgtggctctagattccgttcccggcagcgtttcacacagccatttccttcctccagtttctgccctcactgggacaccgtgctcccgtctctcaggcagcgaagttcgatccatcaaccaaaatctatgaagtaagtggacttgtcacctgttctaaaagagactyttttttttttttttttttttttgagatggagtctcgctttgtcacccaggctggagtgcagaggcacaatcttgactcactgcaacctccacctcccaggttcaagcagttctgcctcagcctcccaagtagctgggattacaggcacctgctgtcatgcccggctaatttttgtagagatggggtttcaccatgttgaccaggctggtctcgaactcctgacctcaggtgatccacccgccttggcctcccaaagtgctgggactacagacgtgagctactgcgcctggccctaaaagagactttctaagaaaaggggatttcttaattattcataccaggtttctgttttagacaagcctatctcatctgtgaatcccgtgaaaatgaatgcaaaagccctttattttctagcattgtttctagggaaagggtccagaacttcagtgagattcttaaaagcacttgggctgggcatggtggctcacgcctgtaatcccagcactttgagaggccgaggcgggcggatcatgaggtcaggagatcgaaaccatcctggctaacatggtgaaaccccgtctctactaaaaatacaaaaaattagccaggcgtcgtggcaggcgcctgtagtcccagctactcggggggctgaggcaggagaatcgcttgaacctggggggcggagcttgcagtgagccgaggttgcgccactgcactccaacctgcgcgacagagcgaactctagccaaaaaagaaaaagaaaagcacttggaaactttgtaagaaacaaatcttcatttgcggtttttaaattgaggtttaatctatatgtagtaaagtacacaaatattaaatatacagcttgatgcatttttatagatgtctgttactttaaggctcttaaaggtgacagctttaattttaaaacactctatcttacttatctggcttgtttttaccagcattatgagtaagaatgagagcacacctcscctagaccctcttgagatgttccccagagccagaacgtgaactgttgttcgcagcctccttcctccctttaggaagcgtctgctctgatgacatgggcgactggcttcctctgtgtggcagcagagctcttttgttaggcaaaaccgagaggtcccccagcccygttcctgtccctgagttagcttgctatttttggaaatggggaatcaggtggggcttctgccttctctcctcttttccccccacgggttatgtcacactgaacaactgcacgtcctgtgtgttatgcccagtgtcacctccatgtgttgtaacgccataggtcmgtggggtgtcataaagaaacacagcagacttgcggaagcccagccttgagtctgcttctgtcatttactgaccatgycccttggacaagttatttastctcccggagtctgtttgctcatctctaaagagagggtgatgacagtacctttttcccagggttacagagggattgaatgagatgatggatggcccagtgcctggaggacagtagcactttgtccttaatagggattttagcaataaagccagcatgaaatttatttttcatgcccttagatttgaaaatttatgacttagaatgtgtgtacttcttaggttaacctgcccttcgtcacctcatgaaaagtaagacagacttaggtggctgactttggagggttttttttgttatatttgctttcattatagatcagcaaccgytggaagctggcccaggtacaagtacaaaaagactctaaagaagctgtcaagaagaaggcagctgagcaaacaggtaacactcacttccttgcaactcagtcggctgttaaagaatggctgttgcacacccgctgtttcagccaagtgccagatacggcgatgaatgaagcccctgtggggcttcccttctgctgagggatggtgggcaatcagtatctatcctggcagatggcagcaggtgctgtgcagagagattggtggggagtgctggaggtgctgtagctgtctcggtggttggagaaggcagtctaatgaatgcgacattgacgagacctgcagtgacctagagaagagttctggagccacagcacagcgagcccagaggccctggggctagttcactgggcatgctgagcagcagcaagtgggcctgcatgagcagaggcgggtagagaagagcaggagatggggaaggagccagcagaggcccacgggatgacgctgccttttactctgagttcagaagccaggagggtgctgagcagacagggggggaagtgactgacatgtggcactctggctgctgtgtcaacagtagactatagaggacaggatgggagtccaggaagggataggagacatggcagtggctcaggcgagaggggatggtggctttgagaccagcgtgggagcagaggaggtggtgagaagctgtcagagccttgatctgtcccatagcaaagctgacagcatttgatgatgaggtggatgtggcatgtgagaraagggaagggaaccttggatgaaggttttgtcctgagcagctggaaagctggagttgctggcagccaaagtagctggtttgagcaggtttgtccacgatggtgatggtgacgatcctgttaaacgccctcaggtccacagrccactgagcatttaggttcacagaagaggagcaggcagggctggggaggatcagctcacgtgtagctgaaggtgggcagagcacctgagcctgagctctgaggcagcctgtcctgcagagatgggggaccggggacctgagagggaggaggaatcagccgtgacaacccctgtggctaggccaagtcggagggggatggagatggaggggagggtggttgctggattcaccaactccagagacaagttctctcccttgcagctgcccgggaacaggcaaaggaggcgtgcaaagctgcagcagaacaggccatctccgtccgacagcaggtcgtggtatgtgccagcttttctcctttttcctttgaaaaacgatgcccctgcttgtggtcaggatcttccttggatatcttagggggcttgccctgtgctttatattaagtcctgacttctttccggttcaccttagcttggctattagtgtctacctcatttccgaaacctccacaagattgatattgtaattcctcttaaccttcttccactgtgtttatggtaaatatgccagaccactcaactgtagtagtagaaaaggtattgaggttacagtgctgaagcttgttgtgtgtcctgctgtgtcctacaaaaaygttgcattctagagaatgaaaccccagagcactctggaactctttttttttttttttttgaagtagtgtctacctctgttgcacaggctggagtgcagtggcacagttgcagctcactacagcctcaaactcttgggctcaaacgatcctccctcctcaaccacccaagtagctagaccacaggcacacaccaccattcccagctattttttgttattgyttttggtggagacggggtctcactatattgcccaggctatcactcgaattcttaacccctgccccctgcctttccttttttttttttttttttttttaatttccttttaaaaaaaaaatagtgacatggtcttactcttaccctgatgcccaggctggagtacagtggtgcaattatagctcattgcagccttgtactcctgggttcaagtgatcctcccacctcagcctcccaagtagctaggactacaagcacgcaccaccatgcccagctacatttgtttctttttttttgtagagatagkggtcttgctatgttgcccaggctggtctcagactgcctaaagcagtcctcccacctaggccgcccaaagcactggaattataggcatgagccactgcacctggcctgcttgcctttcttaaatgacctcatgtcattgtccagtgaggaatttgtttcagctgaccctgagtgttggtcccgaagttccagccacagctcctctccccaccactgactgttcttcttaccacttaggcagctgggtcccagctattgctgaggccggyggagttccctgttcccatgtgcctccctgttcctcccccacatctgttcctgatctacagctagaaaatgctgcaaagaagagagagcgagcaacaagcgacccaaggaccacagaacagaaacaagagaagaaacgactcaaaatttccaagaagccaaaggacccagagccaccagaaaaagagtttacgccttacgactacagccagtcagacttcaaggcttttgctggtgaggaagtaatggggccccatacagggacatctgtgcgcgtcagaggggaggaagccataaagagaccacaatataggggccaagtgagtcctgcacaaggcatggtgctagccaggaattgttggagtagtccagagaggccgtggcaatgtggacagtcgcctgcagcctcattrccrcctcctccatgggagctcaactcatggtggcctccatggtgggttagcaagatcacctgtcacttccactgtgaccagggcgccatccttcctcactataacttgtgcccataaacytctctctctctctctctctttcwcwcacacacacacacacacaacacgaattttgtttgttgaaaaatctcamagcctatgacatgaacccctatggctgcttgggctgtgagagtccgtctgctttgaaggggctacagatggcattctcgactctagcagccttcggagcaacatgctcctttggaaaagagaaagcagaggccagtccacacaatggccctttatacaggagtgtcgcctcagagcccgagttccttatggcatcacccagcacagagatcagaatggatttccttatgtgcgggggccactgctgtagccacctgcccctaaggtcctgggactagagctgagagaaatgggcctggttttcagactgcccacagggaccaggatcgctatgtattcatttatgtgagccatgagccctagcccctcatcgtgacaggggtgctctcacagccaaggcttccctgagtgtcatggtcccggcctcgctgtgagcctgtgatgtgtggtaactcattgacctgaccgcaggtctctctcatctcttacctttcaggaaacagcaaatccaaagtttcttctcagtttgatccaaataaacagaccccgtctggcaaggtaagaactgctcctggaggattttagcacgctggtggcgcctgtttytgacctcctcctctgctgagaagacaggcccatccaggagtccattcctttgcatatctttttcctcacctcatttcttcccaagggcagacagtactgatcagctaccccagcaactcataaaacgaggctgtaaaagctggcatgtggctttaaagggtattattctgtgtttgctaccatgggaactatagctgcaggccaaaagcaccccctttggggccagcacaagcctgcattcacccctcgtgggtgttggtgctggtgccagggaaacagcgtggctgtagcttccacaggcgcgggggcagggctgcttkggggygctcctgttcctcttgcagcgcatcctggcggccttgccttcagagacacagaaacatcctctctcaggggatctaaagtcactcctgtgctgctagaatctttggccacctgagctcaggtgtgtttttctgtgtatcttgtggtcaaggtgcccacccagcttaaacggtttcttttcttttcagaaatgcattgcagccaaaaaaattaaacagtcggtgggaaacaaaagcatgtcctttccaactggaaagtcagacaggtatgtggtggacggcggtgtggcccagggagcccagtgagaaagcacctgccctgcgtggtgyggtccgtggggagtagctggggagcgagtgtccaggggtcttcaaccaggatgactcagagaacctcccacagccaggtccctcacgccactcggaaaacaagggcgggaggtgatttgctctgtgccayacatcacagagccaggcactgcaccccaggactcagattccccttgttcctggctctctagttaccgtgtgtcctggggtcacctcagggaaaataggtgtaaatakttgtgaaattttcctggaccagcctattaggaatgaggaaaaagtaagcacatgtgggttatccttgttgttgaagagtggtttggcttggtttggttttgttttgtgagagtctcattctgtcacccaggctggagtgcagtggcacaatctcagctcactgcaacctccacctcctgggttcaagcaagtctctcacctcagcctcccgagtagctgggattacaggtgcctgccatcatgcccggmtaakgtttttttttttttttcttctttgagatggagtctcggtctgtcgcccaggctggagtgcagtggcrcgatctctgctcactgcaagctscgcctcccgggttcacgccattctcctgcctcagcctctcgagtagctgggaccacaggcgcccgccatgatgcccggctaattttttgtattttttagtagagacrgggtttcaccatgttagccaggatggtctcgatctcctgaccttgtgatccgcccgcctcggcctcccacagtgctggggttacaggcgtgagccaccgcgcccggcctgtttttgtatttttagtagagatggggttttgccatgttggccaggctggtctcaaactcctggcctcaattgatcctcccgccttggcctcccagagtactgggattacaggtgtgagccactgcacccagccaaatgtttttgttaaaaacataaaatcctaataattaagccgaccctgaggtcaggggacttgcccgagggcaggaaaaacaggtctgccttctcaagatgctgctcagctcagccaactctggtgggccrccgagttctctggggcccctgagcaaaccattcttcctctgttctgcatgattaagatttgcaccattttgtaaaccatctgagaacatccaaccagcccggaagaaataactgttgtttttgtactctctgcagaggcttcaggtacaactggccacagagatagtcctggaagacacgtggcgcctgtggaccggaagcaccaaatgctggtgctgcttttgtacatacatatttttaaaccattaaaattcttcctgaagaaagctgattcctgacttttattttgttgccgccacagctctggcaggttgccatcctgttcaggcaaccatcttcagctgtctgtgggcaggtgagtgtgctccgggggttatggtgacttctagaaaaatccagagccggccgggtgcggtggctcacgcctgcaatcccagcactttgggaggctgaggcaggcggatcacgaggtcaggagatcgagaccatgctggccaacacggtgaaagcctttctctactaaaaatacaaaaaattagccgggcatggtggtggacgcctgtaatcccagctactcaggaggctgaggcaggagaatcgcttgaacctaggaggcggaggttgcagtgagccgagatcacgccacctcatttgagcctgggcagtagagcaagactctgtctcaaaaaaaaaggcaaatgcaaagagaaaattttaatcatttgtagtcctgtcacacaaagatgcttttttcctttttttgagacagggtctcactctgttgcccattctggagtgcagtagtgtgatcctagctcactgcagccttgacctcccaggcacatgccaccacacctgggtaatttttcttatgttttatagagatggggtcttgctgtgttgcccaggctggtcttgaactcctggcctcaagcaatcctcctgtcttgtcctgccagtgttgggatttcaggcatgagccaccacacccagctgagattaacattttgctgtatttccttataagctttcgctatgtgtatatagatatatttttaaaatatatcttgggttcaggtttctatcatttgtcaccttgaaagtttgtgttatgacacttttctcaatctaaaatttattttcgccaacccccattgttaaacgcttaggttttcatttttggtactattcttaataatgcagcactcactaaacttttatataaatttgtgacccagtctctgataatttctttagaacttcattttattttaatcctgagatgggctaataaatcaggaaagcacaaaatgccattactttggtttttacaaatacttaacctagaaaccttttttctttgaaattcatcccacaaagtattgagattgccaactgtatatgataacctttggggggtaccaagccaaatcacacatcactgccgtcagagagctcccactcttgaacagcagagaacagccctgtcctaagataggctggagtttgttttagctaggactagactggttgaaaatgacagaaaagccaaactatagtgacttttaacaagagagatgattttcctcctcttttgtaaacatagttggcccagagctagtgtgatgctcatgatcatcagacacaggctcctatcttgttttaccatcctcagctcaaacacaaggctgccgcctcatggtgcagggtgactgcccttgctccagccattacattctcattccagtctgctggaaggaggaaagaacagcacccaatctctttgaataggatactgcccatttcaacttcccattggtcagaacttagtcacaagaccacagcaaggggtactaggaaatatcattatttcagtcatccgtgtgtccagctaaaagcccagggttctactatagaatttgggaagaacagacatcgaaggacaaagaacagtcactgcccaaaaatggcagtctctgctataaaaaattgacaagtggaattttttttttttttttttcctgagacaagagtttcgctcttgttgcccaggctggagtgcaatggcacggcacaatctcggctcactgcaacctccacctcctggattcaagcagttgtcctgcctcagcctcccaaggagttgggattacaggcgcctgccatcacgcccggcttatttttgtatttttaagtacagacaaggtttcaccatgttggtcaggctggtctcgaactcctgacctcaggtgatccactcacctcagcctcccaaagtgctgggattacaggcgtgagccactgtgcccggcctcacaggtggaattttttttttttttttttttttgagacagtctcgctcttgtcacccaggctggagtgcagtggtacgatctcagctcactgcaacctctgcctctcgggttcaagcaattctcctgcctcagcctcccacgtagctgggattacaggcgcccaccaccacacccagctaattagtggagacggggttgtaccatgttggccagactggtcttgaactcctgacctcaagtgatccgcccacctcagccttccaaagtgctgggattgcaaggcgtgagccacgacgcctggccaaagtgagaaattattttctcctgaggatggcctgagaggcctcgtgaaaggcgcattcggactggaccctgaggagcaagggacttccagagagctctatggcagcgcagctcaaagcggaggtctctgacagcccagatgaggacttgtcagaaagaatccagtgccacctagagcctggaggctgccagggccgctgtgctcacccgttaaagtgatgccgcaccctttctttggaagttttccatattggttttgtctgtgtgacaatgtttttctgtttgtttgtttgttggtttgtttgttttttgaggcagagtctccctctggcgttcaggctggagtgcaatggcatgatcttcgctcactgcaatctccatctcctgggttcaagaaattctcctgcctcagcctcccaagtagctgggattagaggtgcccaccaccacgcctggctaatttttgtacttttagtagagatggagtttcaccacgttggccaggctggtcctgaactcctgacctcaggtaatccacccaccttggcctcccaaagtgctgggattacaggcgtgagccactgtgcctggccttctgtttgttttttaaaagacaggaaccttagacaggagtttgagttgttttcaaatattcaatcttgcaaaataaaaagttcgcaacccagtgtcagtccctagatggtgtctgcagaggtttactggtccatcaaaccccaaatccagaactcctcagccatggggtggagatgagggtcttgggtgttcaaagaacaacagctggagctcaatgtcaggtcacttggggagcacctgggacaggactaaggaggatggtgagcacatagaggggtatgtgtgggtcaggaactgtgcagtgactgagtagtggaggccatggctgggcctgtgctccaagaggaagggaaagggatctggcagggctggccaggttggaggtagagagagaatttatgagcagaaggactgtgtgctcaaggaggcatgctgctgtttgcggtgccttaggcagcttgccataagcattttcaaccaagccacaccacataatggccaaaattgttcccactcataaccacagctgtctgcctggctgaatggaagtgtagaaaaatgactcaagtgctaactgcttaacaagcctctcgtgacagacacataaccacgtggcagccccatttaaaccatttccttgaacagtagccattggcccacctttctctcctctaccctttctcccctttttccttttataataacactttttaggaggttgggtgggatagttaacccactagacacttaagctttacaactgggtttttgaggtacattggtctgaatttaggggaaaacatttcatgctaaagcctgattttctcagtcctggttgtttggttgtttttttgttttgttttgttttgttttttggtgttgggggtgtttttttttgtttttttttttttcctttcttggagacagggtctcgctctgtcacctaggctggagtgcagtggtgcgactgtggctcactgcaacctccgcctcctgggttgaagcaattctcatgcctcagcctcccaagtagctgggattacaggtgcacgccacaatggcagctagtttttgtatttttagtagagatggaatttcaccaccttggccaggctggtcttgaactcctgacctcaggtgatccacccgctttggcctcccgaactgctgggattacaagcgtgagccaccacgcgtggccaatcctggtttttttctgtagacttctgtggtcatctggcctgactttaacgtcagttgtgattataactgggctgtgcaataatggctacttctggcaaaatcagtttttcttccttgtgacctgaagtcaggtggcatttctggattcacagtgctgtatatttgggggcttttttgtctgtaatttactcagggcttttgtcttctctgaacttggaaggtttgtgcaatgtctgtacactctggccgagaggtctcaagttctgtgcctgcttgaggctgaggcctctcagtttcactccctctacaggaggacaaaggatgtcaatgtggcctttttcatgtgaggacccacatgctggagcagctttgtccagcttatagaggggatgggatggacctggccctccactttcccccatgcagtgtcctggaatgccagggccactgtctatggtcagtccttcaccacctaaaagcaagctgatccacaaggcacctggctgcatccaggcctgtcatctacggccaccatcctcagcttcagagcttatgatctggctcagggaacacagacaagtactgccatctacagccaccatcctcagcttcagagcttatgatctggcttagggaacacagacaagtacacgggcagttacaacccagaggcagaaatgtcttggaggaagtacaggcaatgtaggcaaacaccttgacccaagtacaggattgaacccaatcaagcctgtagcactggacacactgattgactctgtcttatccactacgtggacatttcaagaataatcttcgttcctggaacaagtccatggaagctgttgcctagcaatgttttttattttttagagacagtcttgctatgttgcccaggctggtctcgaactcctgggctcaagcggtcctcctgcctcggcctcccaaaattctagtattatcagcctgagcccctgtgcccagctgcctagcaattttttttttttttttttgagacggagtttcactatcgttgcccaggctagagtgcagtggcgcaatctcagctcactgcaacctccaactcccgggttcaagcgattctcctgcctcagcctcccgagtagctgggactgcaggcgcgcactaccatgcccagctaatttttgtatttttagtacagacggggtttcaccatgttggccaggatcgtcttgatctcttgacctcgtgatccgcccgcctccgcctccgcctcccacagtgctgggattaccggggtgaaccatcacgcccaggcacctagcaattctttagcggtcttggtttacctcccctttagaaggagcttaaaagcaagcaaggcacattgttgcctaggcttgaggcttgctctcacccataaacaacgctgttactctgctctggggacgacacaggaaacgttccccacctccaggtggaggctgcaaaacgtgtcaaaaccatccctgacataatgtcaagagtagcttatactagtttcatcttccttccttggcattcgaactgcgtgtggaacaattagcatttaatatttggtaattagcatgcttaatgtgattctgagaagttctttgacattctcataaaaacagcacattcccacccacccttcaaagagcaagacccagtttgtcaagaaaaattgcgtgccagtcttttctggtgctgaatatgtatgttctgggcctcttcctggacactgctggtaaatttagaaactcgtttagaaaagcacttctctcgtattcaacagcctataggctcatggcgcagaatctaagggaaaatggctaaatccagcttgtgaat

SEQ ID NO: 97104 - DNA, 15514 bp, Homo sapiens
cagaaggaggttatgatttaaaaggtctgtcccaggccaggtcggggacaattttctctttacaatttttttaaattattaactttattaacgtcttctagatttatacatgagaaataaattttgtgatctacttctaattctagtagttactaaaaatcttgattttttgttttccttttttttcttaaaagaaaaccatcttcagattagacttttagttacacaaaaatcaactgcaaatacacttccagcccaaaataaccacaaaaatttatcaagcaggatttcctgcttatacagatttttgtatatgtatgtttacacatatatgtacatatatacacatatataatgtttccatattaagtgtgattttgttatggcttgctgtaaaatacacacatatgcacaggtacccaggctcattggactaaagataaaagatcagatcctatacaaggaaagagggaagaagcaggaatcaggttattacctctgttcctttcctaataattaaacctgacatgtcacataggttcaaacctacaaacaataacaagcaaaatgattagtataggaaatattaggctatcccatccccatttgctcccaaatcttccatcttgttttcctagtccatcatttatctttgttccctaactttgatgtcaacccctcacccttcaggaccaaaacattcattctccaaaacattcatcgccgagaatgctggggactagcctctctcagtaaatatctgtccctagtctgaggtagatttatgctcccctccccaggaacagcttgtgtctatggagatgtgcccagtgcaaagaactgcaattggaaggcaattctgaaggaccaccctgctgggagctctctgcagttgactgagaagtctttgaaagctcatcttttcttgtcagcccagtcctgcttccttctcctcccgccacacagactgtgttgatttcaagagcatttcccaatacctcctgcacacaaacctccacctgagtctgcttcctgcagctatgaacttcaaagaacgcatgggtgaatgatttggaagcctgccttctaggagaaaatcggtctttggttactgaccaaagccggggatgaaggtaaagcatttcatggtaaagggatcaggaattctaaggcagctacgaagtagctggaccatttcctttatctcttccccagcaccatagatgcccaagaaattgaaactgtctgaactatcttacctgctattatcttaattttaattgccctcccatccctatgtattctgtatttaacagatgaagttaataatccttctaataccatcaaaacaattggccatcaatgatattgaagctatgaatgtacagactataaagaactaggctttgattcttatataatcccaatagcagacttaaaatcaggagaacttccactcctcaaagttgataaccaaacaatcctcccaatagaaattcctatccaaatattaatttcatctgaagatgtcctgcactcatgaactctcccttcactgggcctcaaaacagacgcaatctgtggacgcctaaatcaatccaccttaactgctacacgaccaggcctttaccacagataatgctcagaaatttgttttatactatcatccaagaattaattcccttacaaaatttcaaaacctgatctacatccatactataacatcactgtaaagttatccagcattaaccttttaagttaaagactgagatgatctacacctctctacagtgaatgcctcaactagatacttccacatgattcattgttacccagtcaataatcataacttattctcgatcattcagttaaaattatcaagtttcatttaccatgtatctcctacaccaaaaataatcaaaacacaaaaacataaaaactcctgagaattaaaatgaatgaaaatctattcacctcttttattaccccaacaattctaggcctacccgtagtaatattaatcattttattccccaccatgcatttccaacctccaatcacctaatcagtaattgattgatctctatccaacaatgattagttcaacttgcactaaaacaaataataactacccataatattaaaggacaaacctgatcccttatgctgatatccctaattctcgtcattgcctcaaccaatctcctcgggcttctaccctattcatttacaccaactacccaattatcaataaatctaggtatagcagtccctttgtgagcaggcacagtaatcacaggcttccgctttaaaatcaaaacctccttagctcagtttttatcgcaaggcacacctatgccacttatccctatactggtggtcattgaaactattcacctatttattcaaccagtagcattagctatgcgattaacagccaacattacagccggtcacctattgatacatttaactagaggaggcacactagtattatcaactattagtatcaccacagcttcaatctctctcattattctaatcttactgaccattctcaaatttgctgtagctcttattcaggcttatgtcttcacactactagtaagcctttatctacatgataatacacaatgacccaccaaacacaagcctaccatgtagtcaaacccagcccctgactactaacaagagctctctcggctctcctaataacatctggcctggccatatgatttcactttaactccattactcttttaacgttagatctactgaccaatacactaactatgtatcaatgatgacatgatgttatctgaggaagtacatttcaaagccacgatacaacaattgtccaaaaaggtgtccgatatggaacaattctatttattatctcagaggtacttttatttgctggtttcttctgggcattctaccactctagtctagctccaactccagagttagggggatattgacctccaacaggcattcttcccctcattcttttagaagtacccctcctgaatacatctgtgttacttacttcaggagtttcaattacttgagctcatcacagcctgatggaaggtagtcaaaagcaaataattcaaaaactagctgtcacaattaccttaggcatatacttcaccctgctacaagtttcagaatacttcgaggccccttttactacctctgattatggctcaacgctcttttttttttttttttttttttttttttttttttttttgagacagagtttcgctcttgttgcccaggctggagtgcaatggcatgatcttgggtcactgaaatgtctgcctcccacattcaagcaattctcctgcctcagcatcctgagtagttaggattacaggtatgcaccactacgcccggataattttgtatttttagtagagatggggttgctccattttggtcaggctggtcttgaactctcgacctcaggtgatctgccaacctcggcctcccaaagtgctgcgattacaggtgtcaacgtttctcactatctgcctcctccgtcaattaaaattccattttacatctaactaccactttggctttgaagccaccgcctgatattgacacttcgtagatgtagtgtgactattgttatacgtctctatctactgatgaggatcctactcttttagtataagcagtaccattgatttccaatcaataagtttctataatatccaaaaaagagtaattaacctgacactagccctagtaactgacaccttactggccccaataccaacagttatcacattttgactcccacaacttaatatttatatagaaaaatccagccctcatgaaggtggatttgatccattaacctccgcccacctcctcttctctataaaattcttcctagtggccaccacatttctcctgttcgacttagaaatcgctctactcctacccctgccatgagcccttcaaacaaacaacctgacactaataatcagcacagcccttatactagttaccattttaatcctaggcttgacttaggaatgaactcaaaaaggattagattgagttgaattggtaaatagtttaaattaaaatgaatgattttgactcattagattatgatagaccatatttaccaaatgccctttatttatatcaatattatattagcatacaccatagcacttctgggaatattagtctatcgatcccacctaaaatcatccctattatgcctagaaggcataatattatcaatattcattataattactcttataactttaaatatacatttcgctctagcatccacaatacccattattctcctagtatttgctgcctgtgaagctgcagtgggccttgccttactagtttcagtctccaacatatacagcctagattatgtacaaaatctaagtttacttcaatgctagaagttattattccaaaaattatactgttaccaataacatgactctctaaaaactctatatgccgaattaacatgactactcacagcccattcatcagccttattacgctactatttttaaccaattaaatgataactcatctaacttctcattaatcttctcctctgaccctctaacttcgccccttgtaatctttacaacctgactactacctcttataattctagcaagccaatatcacctttccaatgagtcacccccatggaacaaactctatatttccatattaatttccctacaaatttttttaatcatagcattcacagccacagaactaattatattttatattctctttgaagccacacttattcctaccctaattatcattacctgctgaggtaaccaatcagaacgactcaatgcaagctcatatttcttattttacacactagtagggtcccttcccctacttgttacacttgtccatactcaaaatacctcgggttctctaaatataactgtaataatatttaccacccaagaactattaaactcctgttctaataatcttatatgattagcatgtattttagcttttatggtaaaaatgcctccatatggacttcacctgtgactccccaaagcccacgtggaagcccctattgctggctcaatagtacttgcagcagtactcctaaagctaggtggccacagtattatacggcttacccttaccctcaaccccctaacaaatatatagcctaccccttcctcatactatccttatgagggatcttatgacaagctctatttgtctatgacaaactgatttaaaatcacttatcgcatattcctccgtaagccacatagcacttgttattatagctattctcattcaaaccccttgaagctttacaggtgcagtcacccttataattgcccgtggactcacttcatccttactattctgcctagcaaatttgaattatgagcgagtccatagccaaattatattacttgaggccttcaaacactgcttccactgatagcctcttgatgacttttagcaagtcttactaaccttgccttacccactgctattaatctagtaggagaactcttcctcgctatggcttcattctcctgatcaaacatcaccattatgcttataggacttaatatactaattacagccctttactcctcacatatgctaaccacaacacaacgagggacacttgtgtattacattaacagtattaaaccatcctttacatgagaaaatacattaatacttatacactttgcacctatcttcctattatccttaatccttattattatggggtttgcattctgtaaatatagtttaaccaaaacattagattgtgaatctaataatagaagcctgtaacttcttatctaccgagaaagtatgcaagaactgctaactcatgcccccatgcctaataacatggctttccagactttcaaaggataagagctatccattggtcacaggaacgaaaaatattggtgcaactccaagtaaaagtaataaacatgtattttaccactactataacaaccctaatccccttaaacttaccaatcattactaccttagccaacccctgcaaaaagattcatacccatactatgtaaaaatatctattgcatgcacctttattatcagcctcatctctaccacaatrtatatatttatagaccaagaataatctcaaagtgacattgaataacaatccaaactcttaaactctcactaagcttcaaactatactatttctccacagtatttatcccagtagcgctatttgttacctgatctattgtagagttctcaatatgatatataaactcagaccctaatattaatcaatttttcaaatatttactcattttcctcaccaaaatattaattctaattactgccaataacttctttcaactttttatcggatgagaagatgtgggaattatgtcttttttactaaatggctgatgatacggccgaacagacgctaatctagcagccctctaagcggtcctgtacaaccgcagaggcgatattggctttattttagctatatagcatgattcctcttattctccaacacatgagagcttcaaaaagtatttattctaaatcctacctccaatccctttccattaattagtcttctcctagcagcagcaggaaagtcagctcaatttggctttcatccctgacttccttccaccacagaaggcccaactccagactcagccctactccactctagcactatagttgtagcaggggtttttctacttatctgcttctacccttgaatagaaaataacctattattccaaaactttacattatatttaggggctatgaccaacgtatttacagcaatctgtgatctaacacaaaataactcaaaaaaatcataggattctctacctcaagccaactaggctttataatagtcacaattggcattaatcaatcacacctagcatttcttcatatctgcacccacagctttttttaaagctatgttatttgtatgtttaggacccatcatccataatctcaatgataaacaagacatctgaaaaataggaggactattcaagactttacccttcacttcctccgcccttattattggcagcctcacacttacaggtgtgcctttcctcacaggcttttattctaaagacctcattatcgaaatcgcaaacatgtcatattccaacacctgagccctttctattactcttattgtaacctccctaacagctgtctgtagtacctgaattattttctttgctctgataggacaacctcacttcacaactctgattcatattaacgaaaataaccccttcctaattaactcaattaagcatctaataattggcagcatcttagctggattcctcattaccaatagtattactcctacttcatccccccaaaaaactatgccacttcacctaaaactcacagccctaggtgtgactgccttaggcctcttactagcaatggagctaaattttataactaacaaccttaagctaaattatccattacagacatttaacttctccaatatattaggtttttactagccacaatccaccatacaaccccccacctcaagtctatttacaagccaaaatctggcctcacttctactagacctaatttgattagaaaagtccacaccaaaaaccatttcacaaacccaaatatcagccrccattactgtatctactcaaaaaggcctaattaaactttactttctctccttttttattttactccttctaactctaaattatctaatctattaccccgaataatctcatttgcaacacaaatactaacaaacaatgttcaaccagcaactaccagcaatcaacatccataactttacaaagcagccacactgacagaatcctcatgcaataaccccaccccctcaccctcaaaaattattcaactccacatactattaaaattaattgtgatgaccatcccatcatgctcaactattcactgaatcaacaccaaccctattaataaccctaataataaagcccctcaaatgtcaatagttgaccctcatgtttcagggtattcctcagtagccattgccgcagtataataaaaaacaaccattataccacccaaataaatttaaaacactattaaccccacaaaagccccatcaaagttcaacacaataccacaacccacagcaccactaataatcatccctagatctccataaatagatggtttcgaagaaaaacctacaaatcctataagaaaaagaatacttaatacgaataaaatatatgccattattcctacacggactataatcataactaatggtataaaaaaatcattgtatttcaactgtaagaatgctaatgaccaaaatacscaaaacacacccgctaataaaaattattaaccattaattcattgatcttcccacagcatccagcatttctacatgatgaaactttggctcacttattggtgcctgcttaattctccaaatcatcagagaatgatttctggccgtacactacacatcggataccttaactgccttctcttcagtcaccaatatcagccgagatgtaaattatgactgaataatctgctattttcatgctaacggcgcttcaatatttttcatctgcctcttcctacatgttggccgaggtttatattatgggtcatttatatttctaaaaacctgaaatattggcattatcctcctactcacaaccacagcaacagcatttataggttacatactcccatgaggccaaatatcattctgaggtgctacaataattacaaatctactatcagcaatcccatatatggaaactgaccttgtataatgaatctgaggtggattctcagttgacaaagccacgcttacacaacttttagccttccgttttatctttcccttcatcattgcagctctaacaactgttytccttttattcttacrtgaaacaggatataataaccttcagggatctcatcagaccctgacaaaatcactttccaaccttactacgtaatcaaatatattctaggcctaactctccccctcctcctcctaatagtcctagtactattttcacctgatctcctgagccacctggataattacactttagccaacaccctcaataccccaccccacattaaaccagagtgatacttttccatccctaacaaactaggaggtatgctcgcccttacatcctccattctcattctagcagttattcctatacttcacacatctaaacaacaaaacatagtattctgtccattaagtcgatgcctattctgaatcttagtgctgacctgctcacactcacatgaatcggagggcagtgagtcaactacccttttattatcatcagacagacagcatccattatgtacttctttaccgtcctcacccttatactaatcattgccctaattgaaaacaagctacttaaatgaaactgcccttgtaatataattcaatactctggtcttgtaaaccagaaatggagaatttcctccccagtacaactcaggaaaaaaagtatacccacttcaccatcaacacccaaagctgaaattctgattaaactattccttgcacttttttcagcacacactttaactaccatgccagtattaatgaactagcactaacacattagtgctcttatgtacttcgtgcattactgctagcccccatgaataatatgttgtactataattgcttaactgtacatagtacattaatacatcaaggtacattaaaaatacaatccacatacatataagcatataagcatgtattaatgactctccaactattgcacattcactatcattaatcgtacaacaaaatccagtcaatacgaatatcgacccatactaaaaatccttaatattacgtagtacataaaattttcatcgaacatagcacatttcagtcaaaaaagtccttgtcaacatgaatatcccctcccaaattttggtctcttaatctaccaacctccgagaaatcatcatcccactcgggagtactaccttcctcgctccgggcccataacacttgggggtgactatactgaaactatacctggcatctggttcttacctcagggccataaaactaagatcgaccacacgttcctcttaaataagacatctcaatggactagtgactatcaccctattagccagtcaggggagcactgtcatgcatttggtatttttaactttgggggatgctattaccatcgcgaaaggcctggtcccctctgaatcactgtagacaaactcggatttgatttctgccaaaccagttgtagaaactgagcttatatttaatattctgacctggcataacaaccataagatgttaattaattcatgcttaaaggacataatgagtaaccaatagacaagtatgcacgatcacgtatgcatgatcatgtaggcacgatcatgtacgcctattttcaagaactattttcaacttaatccacaaactccccctcccccacccctgactttaccatcaacctaggtaagtgtacccttgccaaaccccaaaaacaagagactaaaacccagttagagtccaaaagtcatattttaatcatgaataccccaacaggtgccctttgattgatgtgtttcccaaaaatcttaaaaatctttctactaaattaagcctctacttatataacaaatataataactaaattttcaccctcgtactaatataataccttgaacataaccctctgaaagtgctacccataaacaacagcctaaaacaattacccctaatgtaaaacccctctcaatcaaacttctgccaattcaagttaaaccacttaaattaccataattgtaaatgactatttcttccccttatattttaattttatactcaaacatttatgcagttaatgtagcttaattattccaagcaagacactgaaaatgtctagatgggtctgcacgaccccataaacataaaggtttggtcctggtctttctgttaactcttagtaagattacacatgcaagcatccccatcccagtgaagatgccctctagatcacctgaatcaaaaggagcaagtatcaagcacacacaaatgcacctcaaaatactttgttcaatcacacccccacaggaaacagcagtgataaatctttagcaataagcaaaagtttaaaagctctactaatacttagggttggtcaatttcgtgctagccactgtggttatatgattaacccaagctaatagatcttggcataaagagtgtttaagatctaccctcaataaagataaactccatctaagttgtaaaaaaactccagctgaaataaaataaactacaaaagtggctttaatatcctgaaaacacaataactaagacccaaactgggattagatacccaactatgcttagccctaaactataatagttaaattaacaaaacaatttaccagaatactacaagcaacaggttaaaactcaaaggacttggcagtgctttatatccatctagaggagcctgttctataattgataaaccccgatgcacctcaccacctcttgcccccagcctatatgccaccatcttcagcaaaccctagaaaggttgcaaagtaagcacaagtatacacataaaaatgttaggtcaaggtgtagcctatgaggctatattttctttacccagaaaatctcatgatagcctttatgaaatctaagggctcaaagaggatttagcagtaaaccaagagctgagtgcttggttgaatagggtcatgaagcacacacacgccacccataaccatcctcaaatattattctagaaacaaatactactaaagctctctacccatatatagacgacataagttgtaacatggtaagcatactggaaagtgtgcttggaaaaatcaaagtgtgtaacttaacccaaagcatctggcttacaccacaagatttcatcacaacttgatctctttgagccaattctagacccaaacttctctaaaaatattatcaaattatcttaattaaatcacttacctaaacagaagtataggtgatagatatttttaccttgtgcaatagacatagtaccataagggaaagatgaaaaaactaagacaagcataaaaaagcaaagaccaacccttataccttctgcataatgtattaactagaaataactttacatagataaccaaagccaagtctccccaaaccagacaagctactcaagaacagctgaaagagcacacccaactatgtggcaaaatagggggaagattcatgagtaggggtgacaagcctaccaagcctggtgatagctggttttccaagacagaatcttagttcaactttaaactttcccacagaattacataatctccctgtaagtttaactgttaatctaaagagggacaggtcgttagactctaggaaacaaccttcctgcagagggtaaaaaaatattaccatcatagtgagaggtgacagtgtgctggcagccctcacagccctcactggctctgggcgcctcctctgcctgggctcccactttggcggcacttgaggagcccttcagcctgccgctgcactgtgggagcccctttctgggctggccaaggccagagctggctccctcaacttacagggaggtgtggagggagaggcgccagcgggaaccggggctgcgtgcagcacttgcgggtcagctggagttccaggtgggcatgggcttggtgggtcccacactgcctctcacccccgcaccactccccccacaccccccgagtgggctcctgtgcagctggagcctcccctacaagtgccaccctgtgctccaccgcacccagtcccatcgaccacccaagggctgaggagtgcgggcccaaggcacgggactggcaggcagctccacctgtgaccccagtgcaggatccactgggtgaagccagctgggctcctgactggtggggacttggagaacctttatgtctagctaggggattgtaaatacaccaatcggcactctgtatctagctcaagatttgtaaacacaccaatcagcaccctgtgtctagctcagggtttgtgaatgcaccaatcgaagctctgtatctagctaatctagtggggacgtggagaacctttgtgtctagctcagggattgtaaaggcaccaatcagtgccccgtcaaaacagaccactcggctctctgtaaaatggaccaatcagcaggatgtgggtggggccagataagagaataaaagcaggctgccccagccagcagtggcaacccgctggggtccccttccacactgtggaaggtttgttcttttgctctttgcaataaatcttgctgttgctcactctttgggtccacactgcctttatgagctgtaacactcaccacgaaggtctgcagcttcactcctgagccagtgagaccaggaacccaccagaaggaagaaactctgaacacatctgaatatcagaaggaacaaactccggacacactgcctttaagaactgtaacactcaccgtgaaagtccgcggcttcattcttgaagtcagtgagaccaagaacgcaccaattccagacgcaatagttgaccccaaagcagccaccaattaagaaagcgttcaagctcaacatctgactatcctaaattctaatcacactactgaactccttacatcacattggactaatctattatttaatagaagcaataatgttaatataagtaacatgaagatattgcccattacataagcttacatcagactggaaatatccaccgacagttacaggctaatattagcaaatgatttcctaattagttccccggttcagggggagagaaagaggaaatggtcagaaaccaaccattgtaggcaatataatggcctccagaatgtccatgccctaatccctagaatctataaatatgttaccttacatggcaaaagggactttgcaggtgtgactagggttaagaaccttgagattgggaaatatcattatcccaatctcaattatcgctgtgtgtctatcgagtcatatggctccttaaaagctgagaacctttcccaactgtgatgagagactccagagcaataatgagacagatgcaatgttgctggctggagaaaggggccatgagccaagaaatgtgggcagcctctagaagctggaagaggtaaggaaaaggattcctctctggatcttccagaaactatttcagccctgtcaaccccccgatattagcccagtgaagcccatgttagacatccaacgtgcagaactgtaagataataagtgtgtgttgttctaagccactaaatttatagtaatttgttatagcagcagcagtaaattaattccccaacctaggatagaagttgaagaaaacaaagcttaattgaggaggcggtgaattatagtaacagaagcagatggtaacttgaggaaggaacgataatttggggaaggaacagaagttaattctcatgtaggatccatcccagatgttggggaacaatagtgggtactatcagataattttattttttcctctttggcctcttgctcatgatagatctgagaagacacttccacattgcttatgctggctggatattaaaatatgttgcaagtgtctcattctccaattagtagaaagggttataaccagatacaacaagcaagtatgtaaccaaagctgctaaataatgagcagaagcaaaatgaggctttggaacgtggttaagccagactactcatgtttatcaagtaggactaggtatttaagggccatgaaacaggagatcatttataaaaaattattctcattttggttaatcatgaaatctaaaaagtatgtttagctattgaggaggaagtaatgttttggttaaagtaggcaaattactcctatgagcatgtcaggtagggattgcttctagtagaaaatattttttgtttgcatttttaacattaagttaattaataatttattattgtagattggatgaaagttttgtgtggagtgagattactctatttcccctaatttcctgtctatacattcttttcaaagctttccaggctagcaggaaaaagaaacaaacaaaaaaccaaaaacctgcccagtatgtccctagggctgaggggtttttgaccttgagagctgagatcaagacagtaccaatactcaggggatacacgtcatactctatgggttttaggagctgggatttggttactatcagttaaaggcataccacagagatattgcaggttcagttccagaccaccataataaagcacatgataaaccacatatgaattgagtcatacaaattttttggtttctcagcccatataaaagtaatatttacactacactgtagtctattaagtg

SEQ ID NO: 97105 - DNA, 12818 bp, Homo sapiens
acgtaccagctcaccaaagcccggccccgaggtgaggcaaggcgggtcctgggctcggatccctgcaggaaaagggggctggtggggaaaagagcagagcctgaagggccaacccccccgttaggaggtgcagggtaggaagggaggcaggagctgaggccttgcccctgacagtttctttctttccagtgctgctgcagagctcagagcctggggaccagggcctcttcgaggccttcttggagcccctgggcaccctgggctactgtggggctgtgggcctgttacccccaggcgcagcagctccctccggctgggcccaggctccactcagtgacacggctcaagtctacatggagctgcaggtgaccagaggggatggggagggttagggcaggcttgggaagcatgctgggaggaagggaggggctgggctctataaagtaggggaagggaccttctaatggaggatggaggcctggcagcaggcggatgtctgagccttttctccctgttcttccccagggcctggtggacccgcagatccagctacctctgttagccgcccgaaggtacaagttgcagaagcagcttgatagcctcacagccaggaccccatcagaaggggaggcagggactcagaggcaacaaaaggtaaggctgagggaggcccccagaaggctccacccctgagggaatgtgggccaggaggggcctcattcctggatcctcacctccttttctcctcgtccagctttcttccctccagctggaattgtcaaaactggacaaggcagcctctcacctccggcagctgatggatgagcctccagccccagggagcccggagctctaactcatcatccccatcagttttcctccctctcagacctgtctttgaggacaaacagatttgtcagctgtcagggtgcagtgggacgtcagagactatgtggtccatcgccttcattgtgtaaatgaggacacagactggcttggtcgcagtgactgtggtgtccttgagatgctcacattactgcccggcctgcctcccacctggaagtctgggaatgaggagattgagataaacttttgaaatcccaaacatgtctgtttatggctctttggtcccctttgctcccagtggtgacttttgtgcttctgagttgtcccctgagagcttggtctgggaaaagaggaggaggggtcctcgctggaggaagaggaactttctagtcatgggtagggtatgggcacagtggttccggttctacctactttctggactaactgacagtgccctggcttttgcaggctctttctcctccacttctcactaaatggaagcttccccgctccttggctgtatccctagaggtgctgagagaagtaggacttcctccagacctgatgggctgcaggctgtgctgcagatggtgtgcccccaccttctgtgctctgacacctgagtgcccagcctctgagttacacattcacagcacagccagccaccttacccacgccaaacaccatctcatctccatggaattcaagggcctggcccttccacgcccagagtacattctgtccagcagctctgagtagcctgtcctgggctgggtcctctatggtgctagatgtacaatgccatttaatcctactgaaaacctcatgaggcgggtgttagctccattttggagatttttatttttactttatttttgggacagggtctcgctctgttgctcaggctggagtgcagtggcataatcatggctcactgtagcctcaacctccagggctctagtgatcctcctgcctcagacttctgagtagctgggaccacaggtgtgcaccactgtgccctgctactttttttttttttttttttttggaaacggagtcttgctttgtcacctaggctggagtgcactggtgagatcttggctcactgcaacctctacctctctggtacaagtgattctcctgccttagcctcttgagtagctgggattacagttgtctgtcaccacgcccagctaaattttttttgtatttttagtagagacaaggtttcaccatgttggccaggctggttttgaactcctgacctcaagtgatctgcctgcctcggcctcccaaaatgcttggattacaggcatgagccaccatgcccagccctgccctgctaatttttaaaattgttctgtagagatagggttttgccatgttggccagggtggtcttgaacttctgggctcaaataatccacctgccttggcctcccaaggtgttgggattacaagcataagccactgcgcccagcccccattttggagatgaagacgtgtgctcagagaaaagtctccactgggacctaacccaataaattaggtgcaggctctttctggctgctgtaactaaacttcaaatataatggtggcttagatgaggtggatgtttcttctgctgggcataagtagtgcagagatctgcaataatgggagcccacacctccttcaatcttattttcctgccattctgatgcattgtcaaacttcatgtccaaggtctgcaccagctcccatcaccgtgtctgcatttccacccagagggaggagggaaagaaggggatgggcagttttctttttctttttactctgtttcagcaaggtgttttttttttttttttttttttttttttgagcacctgctatggatgggctgggccttattctggacacttagattcatcagtgagtgaaacaaaattctgtgcccttgtagtactttccttctagcaggacagtcagaaataacatacaaatgagtgaacgatatactatgtttgaatgtcatgaatgcaggggagggaaaaaggatagaacaaggtaaggggactctaatgtgtttgtgtggcggggggcaggttgtacttttaaatagtgggtcagggcagaactcactgtaaaggtgaggtttaagcaaaggcttgtaggaggtataggaagagcgttccagacaaagggaagggccagaggaaaacagatagaggcatggtcagacagctcgaggagtagcctggagaccagtgtggtggggcagagtgagaaggggaggatggtgggaggtggagaaacagaggtgagggtggggaattggtggggggtagggaagactcaaggcggacaatctggggcttgtgtccaaaatggtagccagttggctacctaaagcattaaataaaataaaaacgttcagtttcttagtcgtacttgccatatttcaagtgttttggtagttgcatgtggccagtggctactatgttcgtcagcacggttataaaacatttccatcatcacagaaagttctattggaaagcactgatctaagaccttataggctgtttcaagaactttgcttttcctcctctgaaatggaagctcctttcttttcaaggatactaccagaaagttgcccacctcctttctacttgcatcctattggacagaacgtgatcacatggccacagctagctgcaagggaggctgggaaatgtaatgatccacatgctgagttgaaatctacatgactatccaaaaggaggaggatggctgttaggggggccagttagcagtctctgccacccccaggtctggtgaaccccaaagcactcttcactgcactgctctgttttgagccttgggagacaattctttgagaaaaataatctggaaatcacatcctggtgatctcaggccctgaagtctaggaaccaggttgaggtgcatttagctgtctgctctaccaacctcttggacattcagatatccagtcccccaacttgtttggggatcctcacagctgccccatgggcgtcacctgcccactactgcaggctaggggcaagtcataaaatactagtctcctttggagccccctgctacctctccttgggggctaattgtcccaggacagttgtgaaggaaggtagaccaattttttaagtgttttttttccaccctgccattttctatgctcccctcatcttcagtgatgctccatactgaactcttgttgtcttctgtctccaaaggagtcagtctccaatttcatatggagataatggagggttgtgtaggtgtggggggcagagtgggtaccacagaggacagagagcaatcctatcagtaccccccactgctcaagtctgagctgcaagtttgtgttttgagagctggtgagaagtcaattttttttttttttttttttttgagacagagtcttgctctgtagtccaggctggagtgcatggtcttggctcactacagcctctgcttcccaggttcaagcaattctgcctcagctccccgaagtagctgggactacaggcacatgccaccatgtccagctaatttttgtgtttttagtagagatggcgtttcaccatgttggccaggctggtcttgaactcctgacctcaggtgatccacctgacttggcctcccaaagtgctgggattacaggcgtgagtgagccactgcgcctggccaagataatcttgagaaggtggtcaggagtgcctgcctcagaaatcagcataaggaggaccctgaaccccaggggactaggagttatatgttgggaccaggtttccatcctaacagcaatccctaccatcctgccgacgacctataagacaggctgtgatatgtccctaagtagcttccctgtgtgatcctcacaacaacctgatggtgcaggaataatgagaaaaactcagaattgtgtaaaaacaaaacaaaacaacaacaacaaaaaccttcccccaaactgggagggagctgagaggccaaaaagtgactcagacaagtccagcttggtgagtagatgagttttttaggacttacatacaaggcactcctggatggcagcaggacagctttagagatccgtgctgcctcccatgctaaagctgctttcaagctaattttctgactctgccgactgtgtgtgtgcgaatggactgttttccttggtgggttcccagatactctccgggatgtttgggttctcagggacacctgctcctcggccaggcaccgtgaccttggctcgccacctggccttcaggattcaggcagtggcatacaccgttaagtaacctggtaggggacctgtcacactacagcaggtaccatcattgttcccattttgcgagtgaagaaatggaggctccaagaggataagaaacatgcccaggaattcacatgtgggctggtgtcacctcatactcacatggttaaccaggacaggctcagcttgcacctggcctctcctccccagcacttgcgcctggctgggcatcctctcacaagctgaacccgtcatctctcacctgagtgcccacccacctcccaccccaattacctgtgtggatccatgggccaggggaaccatgtcctgggggtgttctgcctatgtctctttctttggtttttgagcccctggccccaatgcttaagcaaagggaaatgaaataaaaatcttgcttaaaccaagacctctgtctagtgcctgacttctccactgctattagatctcaggtgagtgacttgccctctctgagcttcaatttccttatctgtaaaataggataatgatacctagtatgccacattcaagactgctgcaagcatcgaaatagggatgcaggagaaaagcaggacttcaataaatgttgcttctctttattcccaggtgttccaaagatctcaatttggtgtgtgttcctatgcatgcgtatatgtgtgtggtgtgtgtgtccccaaacaactccccagatgccttgtaggcctgtgacactggtgttgagggagacattgtccatccctggaaccctctgctcaacagggggacagtcagagacttgagcatccaacccccacttcctgccagctctgtgctcagggacccacagagtcaagcaagttattgaattcagcataccgaattttatttattgccrctcaggagggtgggggcctgctgaaagacagrgtcggggcctgcctcctgcatccccggcccaaaagccygggccaagaaggacacaggcttcaatggctgtcatgtgttgcagacaacatggtgttgagatcttgcatggtggagggtgacgctggtccctgaagggagatggaggaggaggcagagctgggaacaaagggttaaagggcgcsatgtaagagagctctccattcccaccacggagacatccagaccccagcagaggcccaaactgactcacaaacacacagccccatctttccccttccaaagaactaccttttcaagcaattccaggaagctggactcataggaggaayttgtcagaaaagactccttcagcttcagttgcaaagtcatacccggycctgcggatccagaagtacagcttaggacccagcagtcagggctgattcctccggagacacagaaccttcctgctcacrctccccggcacagttcctcttccccagcaatgcccctccagagcctcttggaagctcaggactggggtgtctctgtcactctcagggaccatgaartcccaccccttttctctggcctcttcttgccacagggacccaggagtcctgccctctagccctcacctgttccatgtgagctgccaaggagggtcaagaggaggacaaggggcagcccagaccccatagtggccactgcgctcctgggatggaggagacactgaagtcccggtggcctctccttaacaggcctgtttctacaccccactcaagccttagcataagtgtttgaggggaaatgggaggaggaatctggtcaactggattttccagttctcccagtaagagaggacccaggagaggaccattcactgtgcttttggggaaaatagaaggaagtcccctctcttccactctgtgtcccacccctcccttgtgtctccaggtttgagggagtgagtgcgggtcctacagacagggaaatggagagggaagcggggaccagggaggcgtccctcctgcaggtgtctgggcccccacccatgcccgggcctcccaaggatctttagagattaattattaactgcagctaattttcatcattcttgacaccgaagggctcaggaatgtgggcccaaaagggaggggtggattaagccaagtttcttccagaacccaggtgtcctgctccctcaggtttttttttttttaaacactagtcaagtgcagtagtgaaaagaggagaaggagtagaacaaggagttgggtctataatggactgtgaacactgcttccccagccttggtggctttctagatgagaaatctggtcatgggaacttccattgctgaacattctgttttacttgctctaacgcatcctggattgtcagggggagacacgagtttcctcagacatcctctcactcctgccttgtgcacccatgaaaaggggacacccacctactcccggccgagatgcctacaggcaagcgctgggacaggcaagcacaggacagatgtgcagagggagttactgaccctctttagaaactaggaaagtaaggcacagagagggtaagtgacctgctaaggtcacccagccaacaagtagcagagagattagaacccatccctctagccagacaaagagacacaccagccatggaaacttgcttgaacacacaagggcacaggccagcatcttcctatctgccacttccctatgcagcctctccaccttccccaaagccagcgggactgagcacagagagacagaggcagagagagcactgggcagaggtggggagagcaaaagcaagatggggaaacagagatagaggcctggtctgcactgtaagtgtaaagtgaggcaaccaatgactcccagacttgcacaggacaacaggaagaccacagtgggaagaaagcatggaggagaagagcagcaggcacaggagggacgagcaggaggtagaattgggaacacagagagatcttcctcggagaagagtaagggccctccctccctccctccctcccttcctccctcccttcctccctccctccctccctcctttccttcctttttttttttttttttttttgacagcgtctcatccctgtcgcccaggctggggtgcagtggtgcaatcttctcctggctcagcctcccgagtagctgggattacaggcacccgccaccacagcaggctaatttttgtatttttagtagagacaaggtttcaccatgttggccaggctggtctccaactcctcacctcaggtgatccaccccctcggcctccctgagtgatggaatcacaggcgtgagccaccgcacctggcctcccccacactttctacagccatgtgctaggctcatcactaagtattcctttatagcgcataagcgcctgtgaagtaggtactagattaccccgattttagaggtgaaattaagacttaggccttgtgacttgccagagaatgcacagctcagcagtggtggattccagtgcagtggactcagccctggtactgagcttctgaggattcagggctgtctggctccagagctggggtctgaccttccatatcacactgtccccaaacatgacacgtgtcttccttggtgccccttatctcccctttccccttccctgtcaaaggaatggaaagctctgtcagctgcagccatctaggtgagacacggctcaggtattgaccttcccagcccactcttaggtttccagaaggtcagatgcagtcctagaccctcatggttcccctacaaccccagcttccaaatcctgcttccctgagggactcatacgtcctgacttccaacggttgtacttctaggaacaagaggatgaccttgggataggtcatttgggtctccccttttaaaggagggtctgggctgtgaattgactcagacctgggggacaggtccctagtccaggaagagcccaagggccaggtgggggagcccgcaggctcttactcactctccccctcaccctgtgcttcctgggatcaggctgggacaggttaatcccctgggacaacttggcgacctctctctggggatggagattctggtgttggtggaggccccggcacaactggctctcccgggactcataataggccccagagcctttaaagagcctgggagatgggcctggccaacacacttcaactggtgccatggacactgtgctggtgctgctcctgggcctgcaggccttggccggacccagtgagcacttgggcccagacagggggtcttgaggaaggacatgaatttgggacccagtgggatggccaactcttctaaccccgttctatggtttatcttcttttttcaacagttcagctgaccctactggggacttctgacacagtatccccaggtctcccctgtctctggaagtctccccactgtctctggaagtctctcctctgtctctggagctctccccggtttctggaagtctcccactgtttctggaagtcttcccactatctctggaggtttccccactgtttctgcaactgtccccactatttccaaaagtttccctactgtctctgaaatcttccctctgtctctggaggtctccccactatctctgcaactgtccccactatctctagaagtctccctactgcctctgggagtgtctcaacagtttcttcaaactctgggagttttcccagcagtcctcagtctttagctccagccgtttctgggagcacttcaggaacagtctccacatcatcaggtgatatttctgttgctcaacccatctcgggagaacccttcagctcggtctgtagctctggggtggggcttcctgcaagcctggcagttttccagaacctcagtggaagcagctcccttgcctttgtggctatacaagggcctctctttctgttttccaattcatcacctttttctgtcatgattagttcctgttgtatcctaagacttttttggctacttcaaggtcatgaaaatattctcctctgcattcttccagaaacgttattattttagctttcaaatttaagtctattatccatctcaagttaatttctgtgtatggagcgaggtggaagtcaagattcattttttcttcttatgaatatccagaaccattatttccaaggaccctcccctgtccctgccattgaacggtgagcacctatcctgaaagtcaagtgactatttgtgtgggtttttcggtaagttttttttttttttgaggtggagtttcactcttgttgcctaggctggagtgcaatggcgcgatctcggctcactgcaacctccgcctcccgggttcaagcaattctcctgcctcagcctccggagtagctgggattacaggcgcctgccaccacacccagctaatttttttgtatttttagtagagacgggattttaccatgttggccaggctggtgtcgaactcctgacgtcaggtgatctgcctgtctcagcctcccaaagtgctgggattacaggtgtgagccactgcacccggcctatcagtcagttcttactccagggccacagtgcttaaggactacagatttgtagcaagtcttgagatctcatagtgtaagttctccctttttttttttaagagagtgtcttggttattctcagtcttgattttcataacattatttcatcagtttattccaaaaacttgctggagtcttgcctgtgggtgcatttgatgtgacctctgctttgctcttgcttgaatctcttctgttttttccctctgccctcttaggacctgcctcatccagtgctcccggaacagctccaactgtgcctgggactttagcactgagtgttgctgtcttaggagttccactgccaccatggctgggtggccaccacgtcctctgggctcagcatcctggccagttaagtcactcttctaggcactgggtcacttacagtaaaatgttggtgggcctattctctctcatttccctgcagccacccctggctccttgggaggagttcagggagagtcattagctcctgctttcaactgtgttttaaacctgtctgaggatgtgtctgtagctcaaaggggttttggtggcctctggtcagaccaactgccagatgcctgttacctggctgctttctcgaaaggttttcatctttcttcctcatgatctaatctctctgttcagggcgagaggcattccttccagagatcacccctccttcttccatcatcctcctcccctccctttcattcctagaaggggagcatagggaataccacgcgggaagtctgacggcaggaaacgaatggaaggaagacaggagatcaggctctggttccccttaaggacaagaatcagggtggagtggtggggagaactggggcttggaggaaggagagtgcctactgaggaccctcccagtgcagaagcatcacagacccagggatgcagaaaatagggcccgagaaagacagtgaggtgcggacctcagtgatgagtctgggactgacagacgtgtccacagggaagaggcaattgagacttggattgaagccctttaaacccccacccccacccctgctgagattctgctcccaaggtgataggagaaaacaccagagagatgaggtctcagagtcagagacatcagtcacagaaagaaagatggaaagtcagagggcagtgggggtctggggggctggaggcaccacttacctcagtcactggccctgtctttgtgccccaggtccgaagccccagaaggactctgtctcagactgggccattgtgttgatcactctcactttggtggcagcaattgtcagcctaatgtacggtatcaagaaggtgagcaatgccatggtccaatgtgtgggatccctgtgccagtggggctgggacctggtgccccaggattcagaggagaacagggctttggggaggggaatgacagcttgcagggcttgttgcagggagggcaaagagagcccttgtctcagtggccgagaaaaacaccggtctggcagggatagggggttggggccactgaaagaggcgggggagtgctggaggctgactggcacgtggaagcactcaactcagctctaggcaatgaaggaccagttctgtggagccacattcacctgggcttgaatccttgtgcaagttacttaatctgtctgtgctccggattcttcattaataataatacttaaataataataatattacatcgcactgattatgtgctaggtgtgctaggtgctgtacatattttagttcacagcaagccagtgatataggaaatattactcctcattttacagatgaggtaattgagtcctggatgaaatgagaatgatggcatccatctcaaagggtggttgggaggatcaaataagcttatgcaaagagagcactaatggtgcttggcatgtattatagtaagtgctcaatatacagccttattcattattattgctgtttttgctcaaagaggaatgctgagtgcctgggttgccaagaggaagcagcagttcatgggaagagctgggctgagcagcaggttcccgggtccctagattaacccatcgtaccctcccctcatctcacaggcctgccagttccggagggagatgagtctggggtgtggctgtggctctgtgaccccttacagcagccaccatgagggggaggctgccagccagcgctactcttgtca

SEQ ID NO: 97106 - DNA, 13443 bp, Homo sapiens
agcccatttggaagcttctcagaggcaacgagaaacctcaggctccccatcctcatcccctccgtgtcagcagaaaaatgagacttccatgaaccaagtgaaatagaaatggttggtgtgtaaattcataccactggacaagcaagtggggaggtggtatagcccatccgatgtctgccaaggcagggtgatgacgacaatgaccacaatcctgacaacaatgatggttgccatttatccacttacttagagcttgactctgtcacatgctgtagaagcactaacttaattcctgcagtaaagaatcatttatccccattctatggaagggaatctgagccacagagtggctcactcatttgtccagggccacacagctcctaaaagacaaagccaggactcaaacccaggtctgcccgtcccccaacaccactttctctgatatcagatacagcatgggttcccacctcgcattcatgcaggacaccaggtgaggccgctgcctccttcaggaagcaaggtggatgggagcagtcatcccaagtgggagggaaagatatgagataagaggccaaaactgttgggaatggaaacatcagaatatccttggcccccctacgcagtggtcccagccaaaggaagcaaagccaccaggctccaccgcctgagaccactcagctgttgggagaagatggcagaagtacagggctggggagagagggcctggattcaggccgtctctgcacatcctgaagcctcagttcaccttcctctaactggggttaccattgccatggcttaagggtggctgcaaagacccagggaggcgatgccccaggacagcaccttctgtctgatagctttccagcaagaggctaaggccatataacaggaattctttaaagcctttaattaaaaagttaaacatacttaaagaacgtaaatgatgctgagctttgccccactctcacttcttggaagcagccattgctaaggcattagcacatagccgtctcgacttgcagccttcacctcccgtgtgcacactgcgggctggttcccctgtgcttcccattctgggactcacctttccccaggatgactctcctgctcctctcttctccctcattctttttcaacagctgcagagaactctaaaagcacagaagggccatgatttatttggccattccctgcttggtgagtatttgggttgtttccagtttttctccattgcagacaaagcttcactaggcagcctcaaacacacacccctgcacacactccctggtgcacacatgccttcctgagtctagatgcctagaggtggaggattgcagacgaagagggtgggcaccatttcatttctaaagtaggacaagacaactgaacatccccccatgcctcaagatgggggctcacagggccagtgacgaggaaaggctctgtcccttcatcaccaacacttgtgcctttctcttcctcttcaggtacaaggtgacctgccaaagctcagagctggccaaggacatcctggtgccctcctttgaccctaagaataagcactgtgtgtttcaaggtgacctcctgctcttcagctgtgcaggcgcccaccccaggcaccagagggtctgcccctgccgggacttcatcaagggccaggtggctctctgcaaagactgcctatagcagctacctgctcagccctgcaccatgctgctggggaagacagtggccccagccccgtcaggcagggccagggacagaagtcatgcagggactctggcaagagcctgaactttttcgtagaaggttctgaattggcattgcccttgctgcactccgagcaacccagtggagtcttcaccaaaacaaaacaagagcgtatgtcaggccaggagcctggcttgtccctggcacaacatcatttctgtttctcaaggagcaactgtgggaagactgtcactgcagctgctccagggcaaaagaaagtctcaagagtcctttaaaacaaaacaggaggaattgagctgatgggaaagaactctgaatgggaatattcctaaacccattaacttatttattcgggtgggagggaggggaccgcgggagggagaggagggattgatcacaggcttcttttatttccactgttaatcatccaccttcactatactgttgttctgtctgctttgggcagggtgcaggagagagaccgtgtgccgtggggctggtggcctgctcagggacagccatggggacctggcagctcaaaacagatggcagcagaacaaaagaaacttttgctttggaagcacagccaaactccccagggcatcgtcatagatggcacctagagcatgggctgcctcagtcagggggacgtgcctgtgttgtccagagagcccagccagggacgaaaaaggagatgaggcccctttcctccatgtccccatgcccagacacataccttggccgtaatttcttttagaatccctttgggaaggaaatacaggattgagggattttggagtttctggtaaactcaccctccctccagccccgctatgaggaggaaagtagagatgaaagactcacgctgttcatggacttggagaggattatctttgagccaagatttggacaggagtgaagtcggtccttaagaatttgtggcgcgaccggagctgggctcctgacaggtgggcttgtgttgtgtcccctctgatggcaccaaagtccagggaagggggctcttgatgtctgctgggggagtgggggcagctcaggatgaatgcagtgccctgtcctggctactcacctgagggtgtagctcgcaaaggtgggaatctggtgctggcttttccttcaggcaggatcactctgacttgttgagtaatcagtcatcaggttggcctggtcagacacactggaccccaccttccaaaccctggacccccccatgctctgcctttgtataagttcccaccccactgaatcattgctgccatgctctgtacaagtttgtaagtttctgaaaagcccctgacatctccatgctgatgcaagtgagaccccttctgcctaatgtgagcggttggcgtcctccacttggcctctgctgggcgcctcagtcgctcaatgatgtgctctgtgccggggcttccaagcacccttcctgctaacagagggcggcccagtggagcctccgctgggcagaactgatgggcaaggcgtaatggctggtagctttcagaatgtgagggaaaggaagaattccgcttcatggggactagagttagtgtggggcctttaagtctgggaagttacattctgcttctttctcagttgctacacaaatgtgcagccagccttttttcttaggcccactgagatccctgctcagtgcgtctcaattgtatctccagtctaagaggagggtggggggcacccggggcctcctccactccttaggtggcccccgagcacatctgccaggtagagtaccatggggaggcctctgccctgagcatcatcacaggggcgcctccagacctggctgagaatagcctctgcttgggcctaggaagaagggcagaagtccaaaggaaaccttggtgagtgagtgtgtgtgtgtgtgtgtgtgtgtgtgtgtgtgtgtgtgtgtgtgtatgagcctgtgcatttcttttaagcaagggcagtttcctgcagtaggagggcagatgactggcatccttgctgtaaggaagagctttttccttgtgaatgggcctcttggctgtaccctagggtgtgggaatttgctagagttccctgacctgcaatccctgggccagtgccgccctctcctgggctcttccaggagcattgaacactgaggatgtcaatgcaagtatctgaccaacagggggagcctgcaggccgagcaaagtttaacccacttagccactgctacttaagcaaggaagctgaaaggtaaccttagccctgccttgtgttccaaaagctgcaaggatcatttgctggctgtccctaagttcaaggcctccctaccttccccttcttttccaagtcacaacccgccctgcccgggccagacagcccagaagaacacttttctgccatttaaaaatccctctttcatcccccccagtccagtattgagtggaagtgcgccggagttccactgacagggcagctgctcttggagcaaacaagcccacactccagttgtttagggcattatctgaagagtcagtgacccctgaatgtgtactggctcccaggcctcctcagacttggcccaggtctagtcagtgatcctggagaggaaactggggagggggcttccaactgccctgcatggaagaggagaggaaggtgcccctgtgtgggctggaagcctgcagaggttttgccgttgctgatcttgatagaatcctaaaccgatttatagctgataacagttccatggggagagaaatcctaagttatgattaatgtttttccccgctataatatcttgcctgtttttttggattattttccccattgtgatcctaagctcttaaaaaacttgagggaaaacattcatctaatttactaaaagagaaagctttccattgaaaggtagatactttgaggagtaaaaagacttctttgaatgctggtaaacaccgcatttattttgtgtatgcagtttgatttgcacatgtataaatggagatgcttttcatttttgtttggactgggtttgtgtcactgctcattacagtttgcttttttgtgtgtttgctgtgcgtttggagatattagtcagtttctttagtgatatttgtttccttgatgtgccttttcgtttttctttggggtttttggaatccggatgctgttgaagggcaatagcagactcctccagctaagagacaggacatgttcttgagccactgtagctgttgaagctggacaccagacgctccctataacccccccgccaggccatagcgtgtatgcatgtgcacttccacccacagaggagggtgtgaagccttgagaacctcaagaaagggctggattctgccatacctttgggtctaccttgggactgctggttgccaacgtgtcaaccagcctgtgttccctgccacccacgcacttgctgaggtgtggctgaggcagaatcatgtgaatgggtgcatccaaggagttcagggccctgcttggagaagaaatactttagcatcatgaaagggaaagaacgtgcaccccttttttgtttctttagtgaatgcaagatttaataaaagtgaataatgagcttcccctttgggagtggagcccagtgcagctcactgacagggttgacatcagtatgatgtgttggactgaaactgtatgtctgtaggtaggtgtgtgccttttagggcagaccacggtggccaccccatttctccaaggtggtttacctagcttgtgtatattagacattgccaccctcacctctggccaaaaattcttgatttaaaaagaaaagtctattttgttaacgacaggctctgttgtatgtgttactatcccaagcctggattattttatttatttaaaagtattttaatttccatattggctttattctaatcccatccatccctgtggagctgcagagcatcttcatgtgagtagacggatggacataaatagattcatgctcatttaggaagctgggagtttcgtgaagctgagggtgagttcctgtgattcttgttcgcttcaacaaaaagtgggagaccaagtttttatagcaaaagaccaaattagctgtagagtcttgaatgcagaaaaaaattaccctagctttcttagcacttagggttttgtgaggattcagtgtttagcacagtgcttggcacatagtaagccctagtaaatgttaaatattgttattagtgtttcgtaaaacttgagaaatagagctgagctcattcccttcctgttgattcaaaaataatacctacatgaaaacatgattccaagttgattgaatgttgtaggaattactggtttagagtagcccagttctcggcctaccctgctggttgggatcttactgtattcttgaatgcactggtttgaaaatatgccagacttcagcccccaaggaaacaaggctgcaagaatttatgaactccagctggaaaaggtaaaggtgacctttggctagccacatactggaccttaccccactgacgtctttcagaacattccaagggttttcctcaaggaacatttttgagctagaaattaaaatgggttctctggcagactgcaccccttgagtcaaagttaacagtattcctttgaatgcaataatagaggcttttctgcgttaagggagaaggaatgaccaattgaacttacacattccccaggcaggtccctttgccggcccctacaggctggggtggcccctcctgtcctcagggatcagactcccagactggttagttctgcatgtttccatcaaattaaaggttattccctggccgcctcctggagaaaaccaaccccaccctgccagctgggggcaatggggcagggattttggcctctcagaacagctcctagaggctgctcatgactgaatgttttcccaaatcacctaaatatcggtttgctttttgttttgggggagaggatttagcctcttacttccctgatggattcaaagttttatctatctccttatctcctgccctgtcttggcacaactctggatagattgcaggtgtggaatttgctggagtttggtgwcttcstcaaattcctttggattctgttccgccaaatcagcagtctcgtcctgtggatgcagtgactggaatttcccatctgcaaagcatctctgtagcccagattttgtggagccttaagacrctccctcaatgccaccctgaccccacggctggagaaccctgtgcttatgtggtgggcagggccactgttgatggaggatggcggggacggggtggtgctcaaaggatctgtggtgctggaggtctacacgcctctcaggacagcgtgtcaggaacctcagagcagcttcacatctgccaaagctgagagggagygaacttgggaagcattttgctcattgtcctacccaagtattaatagcataatagttgatgccaaaggagatggtgacgtcccttccactgtagttgctgtcacaaccttgacgtctttaagctaatggccgtttgcatctgtgtcttcaaacagatcctggttacagccattttgtgtgattcacttcgggggttaagtaatgcaggattctgcaaacaaggtgtcgccgtccaaatgtactgtcctggcatagagagcactgctttgttttccactgttgtagagaaaactagggagaactttatttttcaataaacttttcttgtgtgacaggtggaagtgatttttgggggggcgggtgcatgcagggtcacctccagaacaaagctgagctgctgtctaggcgcgtccccagcacacagcttcccccagctgtatttcacggtttgcagcacactgttgaaactgctggtaggaagacaggaaggtatacttaaggagtggagaggggaaggttttactactgtgtattccttcccttatatcacatccaccactactcatgttagcgcactctccttgtgctgccttcccctagaaggaaattcaattagaaagtgaactgctagattttgagaaaaatctttaagaatgagctaataaaaatagctctataaggggctgagcaccagcgaccattggacctagaatagatttctccctttcaagagcagcttttgagccaggaagcagtgagccatgagcagctggttaggcaaatgccctggagacagggaaggttagtccatgccccacccaacagtttgtctgcagatgacactggccctcatctgcatggcctctctgaagctggcgggcctcctggctacggcccaaaatggacaccccacacagttcacagagcatgttagaacacaagggaaagccgagtgcctacatttgggcaacgctaccagtgtcacttcccctccctgagcttccatgatgtatattagacacaacgagaaaaccagcagaagagaaacctacaggctcctacacttcccaatcttttttttctttagttcatgttgttacatattaacatcccttgacgtattcctcagtactgctggggaagcaacctgaaagcatggtactggaccaagtttccatgacctcacagaacaaactcccttcactggcgtggaggggagacagggccccaaagctgcagcaaggccatggagcagctgtccctcggtgccaggtgagtgtgtggcccctacctgagtggtcagagagggcggcctgcaccacagtccttcagggtctccacgttcagcacccctaggcacaagcttcccctcccaggtcatccttcagccacagcggaaaacctgcccatgacgggtctccccatgtgttggtgccgcacggtgacgactgccaaagattgccttcccatgccatacaaaacaggtaaaggtctttattggtcagccactactgcccgggcaagcagtggtgtgagaggtacagaacggtgcgggttggggaacactctacagaatctaaacctaccgtgacatcagctgagaacgtcttgttccttacagagggagcgatccatctctcacagactgtaatgtacccattaccacttaacacagcatatagatatatgcatatacggatagattatatttatttattacaaataaactgtagtttcacatctctcaaaaatggacccagttttcacatggatgttcaggttctgaatgtacaagaaaaggtcaatgtgcttatttaattcgtccatgcaaagcttatacgtgtatcactaagtactttaaaaaatagaatggtctccttttgagcaaatctgtttagacttaggattagtaaaacagtatgaaataatgagatacactgatagaaattaggaagtgacatactgatgattctgggtatgtaaagggtgaggggtacaatcttcccttaagacctgccaggaaaggagagacttggaaccaggagtggcagggccacccaagctggaggaggtgggtctgctcagtcctatgcagcgcaggctcagagcaccaccgaagacctttctgccaaagatctcatcctacccatgagaaccatcatactccagagactaaaaaacgccagtcccagctggagacggggaaggaggtccattcctatgggcattgtcccaacatgtttgatgggggcggcaggtgatgggggcaaggtagatccacctggctgggcagaccttgtcttgtaatgacaaaccatgtgaaagaaaacttccaaaaagaaaccagatgttcagttaaatattggcaccctttgcctatgtggaaactcctcatctcgatggtctcatgcggatgctggcccccttcactcaaacatctcgtagtgacgtgtctgcctcaccctcggcaccatgtcgatgaggagtctgcaaagacgaagacagacaaggtcacctccatggcatggggctgaagagcttggggaagcgtattttcattttttttttcctgagataattcacataccataaaattcaccctatgtggctcggtggtttttagtatattcatccatttgtgttatctcagaaaccccatgtccactgtaccattcactccccatcctccccacgcctgacgagaagtaccctccttctggcctctatggatttgcctattgatattttatataaacaaaatcacataacgtggccttttgtgacttccttcataatatttgaggtccatctatgttggagcgagtattagcacttcattcctttttgggggctgaataagtgtccactgcacagatctaccacatttatccattcatctgttaatggacaattgtgttgcttctgcgttttgcctattgtgaataactctgctgtgaatttcacggacaactttcagtgtggaggtttgtttccatcctcctgcagtgtataccaaggactggaagtgctggggcgaatggtaactctgcgtccatggcagcaccatcgtccattcccacagccatggatgagggttccactttcgccacgtcctcactgacgctggcagttgtccctctttttgatgatagccatcctacctttccttgagaatggaagcattttaacatttaaaagcagagcaccctttagaaatggttctctgaaaggccagctccagcctgggtgctgaagtccatgtcagtgatgccagcacggcctttctgcactgactagtccccttttgcaagaagttctctaaggctagggatgcggcctctggccagcacactgttgcatcccccatttgtggcaggaggggctccacttgtgaggaaaccacgcaaaggtgcttccctggggcatcatgaagactgtcagagaggaaggagcatagatgtcaggacacgaagggtcctaaaggcatcagatggaaatcaaggagtgcctttgtggcttaaaggcctgatacctcttgtccctgcctcacttctgtgccagccccaaggatatctgacccctgctgggtgcttttccagtcacctgacactggtcaggctcaggaggggcacaggtacaaaatatgaccttcagaagcctgtcatttcctgactggggaaggcggtggaaaagggacactcctagctgccaggaaagcaaacaggaaagcacaagaacctacttgaccccataggcaaatatggtgaggccgatcagaacgcctatgctgccgtccaggtaccagaccgccgagtcatgcttgaacacttccgcgctcagaagaatggagaagcccatcacgccacccacgagggagttaaaccctgcaaaggaagtggagagaggctagatggcagtgccaagcaatccaagaaaatcacccaaatgccagtcctgcctccacgtaactggagcatgtgctgggaggaatgatgcccaaagctctcacgagtgatagccaccacctgggcccatcaagtctctgctcaaatgtcaccagatacctcccagaatagagccatcacccccaccatcattctgtacctgctttatttctcttctgggaactgacgccatatgtggtttatagctggtctcgcccgtgcccgctagaacgcaaacctcctagaggcaggggtgtggttttctgttgagtccacagtccccaggacagttccaggctcacagtagacattcaaatacttggggactcatatctgagtgtctgctgggccagattccgagttgggtgttcaggacgtgtggttacctataacctttctcaatcgtgtgacgtcacattatcatcatcatccctgctttccgatgagaaaactaagaatgaggttaaatacattgatggaggttatccagattgagaagggcattctatcccaacctgcatcctttccctcccgagtctcctctaagtaacctgaggttttttcctttccctccagaagagaaatgtaaagtctattatgctaagttttttgcaaagtattggctacatggttggagaaatggccataaaaacagaactggagctactagatagtgactgccatctcctttcacacagcagcccactggggctcccagcttacatgtgatacttctactttaccagagctgtcaaaggccacatgggaagggaagggaatggcttaaggtagcttctagggtctccccgcgaaggacaccagctcctcccctgccccaacacactggtggccccaagagaagctccaggtccacgctgcccaaggaggccctgctggtaggtttgtgcaggcccgtaacctcccacgccaggcccggcttcccctggggcagaggaagattgccaggcagggatgacctgagcaaatctactcaggatccaaggcagggatgcaatggccgctcacaggaatggaagatgaaccgcggacctgcaagggcaccccagggactggcctggaccctacaacgcacttggtggcacgcccttctctcccctgtgctcaggacaccgaggtttggtcgaggatacctcatattccccacaccacatccaccacccacctgtaactgttcctgtaacaggaacaagggctggttcttgcgatgttcctccctccctccttcccagattggattggattgctcctactgggattaacccaccttcccatccccagtgaactcttcttccaccccacgcctcccccatctcctactggccttcacaaaacccgcagaagagtctgcctgctgcctccacactcacaccccccttctgcccgggttccctcctcccccagcccttcccaaagtcaaagtcatcctcatcctgctacctgcagtggtgacaggcccccttttggtgggggtcaatccctagccccacacccccctccccaggctcctcctgtcccctttgctgggtcctcccctgcatccccacctgagtgtcccaggctctgtcctctgagctggccctctgccaatccatgagccctgctcccctcaattcccagcttttgtcctgacctttgacctcaggcacaggctcctcatggaagcatctcagactgaccacagccatgacaaagccctgagcgccacctcgccctccgctgcatgctccgtagatggggccaccagctgcagaggccaagattctaggagcccatcttcccttacaccaccaacctgcccctcgagccccttgccagatgttacccccccccaaattcattctcactctccccgctgatccctgctctgtcctggccacctgtggccctccctgtaccccgccacagccagagggaccctctgtcggtgagcagcagccagactctcccgcaggaaagcccccgtcacgggctcaaatcccaccagacccctcacatccagccacacaaccctgcaacagccatcctgccctcccctcagggccactgggcttgtcaccatcacccagggcctccctcccagccctgtcctcagccctcagcccctaaacttcctcccctccacccaccactccctcctgcctccagctaacaggcgagctttgccattttaaccgcccccctcctctcactggaaacctaagcttaaggacaggaactttgtctctccttgcagtattcgaagtcccaggacagggcctggcattcatcaggggtgcaaatgaccgctgcattaacaagtgaccacacgaaggaggaagtaggcaggcaggcatgggcccagcctgagcg

SEQ ID NO: 97107 - DNA, 13355 bp, Homo sapiens
cacagggtgctctgaggcttctaaacagctgtccacataggcactaacttggtatatcctcctgacaaccctatgactgaagcagcatcttcatgagagatgctttcgatgggagaggttaagtaacttgtctgaggtctcttggccgtaaagggacaatattgcaccagcagccacatgcctgaccatttatgtagcttctgactagcactaaatttctttaaggtctgatttatctctaacatgcttgtaaattttgcataatttttactccataattctggtacatgtttgttttaatataaaaataacagttgatcctaccagcttactcactccacttttttgcttcttgggctaaaagtgacacaccaataagattgcatcctggctgggcgcggtggctcacacctgtaaccccagcactttgggaggccgaggcgggtggatcacaaggtccggagttcaagaccagcctggccaacatggagaaactctgtctctactaaaaatacaaaaattatttgggcatggtggtgcatgcctgtaatcccagctacttgggaggctgaggaaggagaattgcttgaactggggcccaggaggcagaggtagaagtgagccaagattgcgccactgcactccagcctgggcaacagagcgagactctatctcaaaaaaaaaaaaaaaaaagactgcttcctgctgtcccgtgttctccgagccctccgacaggcacacacctgtggatgatcttagaactcatgtaagcagcgggggtcgtagagaaaatgaatcggtacctaaggcaatgtgcagaagtgaatggagcaatagaaagaagaattatttgatgtaaactaaagatctcaacaactcgaatcaggttatttaatcaggaatcaaaagcgcatgaggggttcaagtccaactgcaaagcttggggttctggaggaccacagatgcagctgcccccaaggatgctgagcatgtgactacacatgcaaatgaaagggaaacaaaaccaaatggatggggtgatgggcagagttaaggtctagacagcattttgagatctttgctgtcctcaccatgagtcactctagaaagcctgggggtcacatgactgaggggacacagccctttccccagagcctctccctgcatcctctcgttcttgcccctggctgctggctcaggaggcaccacgtgttgtaacagctctgtggttctggagtgagacacaggttgttggcttcgttacttggggatgaatgtttgtcataggtactgggcatgcctcttgacagccatgtgaccctggatgagtaacttcagttctctgagcaggtgcctcatctacaaatggggattgtcattgctcccatcagtctaaggaggaaatgaaatcataagtagcagctcactctggactgacgtagcacaattggctgatgatcatggtcgtcctcctcctccccccgctcccttcccttccatcccttccctccccctctcccttccctcccccccttctccttttcttgtcatcatcagggtaaatcgaaggaaagagccatttttgcaggtctaaacggttgaatgttagggatttcacatggttccacctgctacttctgctctgaccactgataacagtgacacacagatggcagccgtccctggtcacacagatgccaaagtgagctcattctcctgctgtgtgacagaagaaaaggctgacggtccccagagcgtagcgctgggagcctgcggggtagccgccgggtgatttaccagggtccccttctaggtttcactattggcacctggttaatgggaaggggatttagggacccggtgctgagatggtcttttactgttcttcagagcaaagtcctgtgaacgctgacaggtagcgcactcaccttctaggtttgaaagctcgcttgttcctgtctgtgtggctggcccacacctaactgccatgaggtttttttccgctgcctttctgatggcttcacagtgggaaacctgctgtgtccatcccagccagccctttctttgtgaaagtggtaagaagataaccccattctaacttggttgttcttttttcctttccttttgcaaagagtgcttttgccgggggtggggtgggaggctgcaagggttttggagccatggaaacttaatccttgtgtgtccagcaaacaggccccttggagcagccgcattccatgcagccccgtggcacccgcttccgtggccctcgagggcccaccctcgagggtgctcggcattctgtctgagccccagcctgcctgtctgccatattccccatcaccccctatttctctcacatggtactaacccacctagagtaggttacatttaatggggtgagaaaaatccacaccgtaagagaaaagtcgcaggtgaggtcaaactgcttcctcccaggagggaaaatgattttttctcctctctggctcccacactgaaaattcatacaaaagggctctttttatgtttgatgtattgcctttaaaaaacaaacctttcatgttttttcatttttggttcatacctcttggccgacccagcaggaacttggcagttggtgagcagcttctcgcaaatgctgaaagcggtctcactgaacagtcaccgctgcccagagccctggatgtgtgggttggtgtgtactcggctccggcaggggtgggggtctgcatgttgttgccccggacatcctatgtggggtttccttatgcgattcttgctacttggtatgtatttgaattgtttttacaacagaggacgcttcttagggttacctgaggcacggtgagcaggttttattttggacaagcctatatgttgctgtttttttctattatgattcatgtccccaaagatctctgctgaggcatatttagccaactttaaatacaagcaagctcaaacgaaggcacccctgcatctatcatttcattttcttctgtttacaaagcacattgtcctacacccaggttctttgccaacaccactgccaaatcaacacagatggacaaaatggtggacggaatggcttaagaacattttgctgacttcctcattttttttccacggagagaacaccacagttctgccatcagctgctcccagaacctgaagtgctctgcaggctgacagaaacactgccctgccagagtggttaatagcagcttctgacctgccttcctgggcagacagcctcctgcctgtctgagccttcacagcccagattggagcattcctgcgtccgtttgcgtttttctccatggatgatcaaaagcataagatcgtgggaaaggcagccattgagccacggaagcgtaagatcatgggaaaggcagccagatacagaatatgtctatgtggttgtttcctgtcttcaatctgaatgaagagccaaggaaacaccataggtcccacttcctaatcctccatgattttggtgtgtttgttggctgttttcaccctctacatcagccaacaaacacacacaccaaaatgtttttttgtttgtttgtttgtttgttttgagatggggtcccactccatcgccaggctggagtgcagtcgcacgatctcagctcactgtaaccttcacctcctgggttcaagcaattctcctgcctcagcctcctgagtagctgggattacaggtgcaccccaccacacccagctaatttttgtatttttagtagagacagggtttcaccatgttggctaggatggtcttgatctcctgacctcgtgatgggcccaccttggcctcccaaagtgctgggattataggcatgagccactgcgccaggcccaaaacggtttttaatgataatacccagggtgggcaaggatataatgaaacaggtacttttaagccttgttcaaaccccagtgggagtgtacattagagcaacctcttgaaaagcagtgtggcagtaggcatcaggagttgtaaaaagttaatatccttgacccattgataccacttctagtaatctacccttaagaaatgatcagatacatcggaaagttcatactcacaaagatgtatagttaagtactctgtacacactcactcaatggaatattgtccatcagcagaaagactatggcaagatacagaaatgctcagaccacttaaagtaaaaagcaggtttcaataaattattaattcgtagattaaaatcttaaaacatgcatctttgagaaaggactagaaaatgcgtaaggtggcaatcgttgtgttagtatgtgtgatgaaatcttttgtttctgttttccagactgtcgggattactctcataatttttaaaattaataaaccaaatatcctgtacacttccaaccatggtaaagggaaacattactttggtcttcactaatttagaatttgtgattgtcttgatacagattacatggaaatttcctagtttatggacacaaacaaaattatagggaaaatgtataaattacttgagtagatcaagcccaaagccatattctggtataattttagttaattaaatgtatttaaaataagtagaactacatttaaaaagaatgtttttcaccacatcactctacagttttctgacttactgatttcattgtgtttgtaacattaaatggatgaggtggtatgtactgtttaagaagtcgaacaaccagcctgggcaacatagcaagaccctgtctctagaaaaaatttaaaaattagccaggcatggtggcacacacctgtggtcccagttacttgggaggctgaggtgggaggatggcttgagcccgggaggtcaagcctgcagtgagctatgattgcaccactgcactttagcctgggcaacagaatgagagtctgtctgaaaacaaacaaacaaacaaaattaaaagaagtagagcaaaaaaaatcaggtggctgttatggccataggagatgcgtcttcttattgcctttttctagtaggataatcaagattctcagttactaactagagggactttctcttacccactagaactttcctaatcaaagaatgtattcctaatctttctgccccttcccccgcaaaaaagtgccccacaaaaacaacgaaatccaactactagcaattaaagagctctggcacgtgactgcacctcagtgtctaggacgtgagagtcattcatctttaccaaagaagttattcatcctcagtaaaagttcctttgagtttttataacttcaggatccttttaataacacactcattttatataataatatccaactgtaatgcagtacataaacctctctcccagaccctacccagagctcctcctcccacactcattactgctctggtctgtagcaggaactttaatcttcctctttgcattttaatgcttatcataaaaaacgttatgagaagttccaggcagtttcattttgtgaaagcacacacagcaatcttgatttcgttagaatgttaagctctgtttactgttcttgggtttatgagggtcattccgtgggccagtgtgtaacagtaggtctggaggcccgtcagccctaagttccgatggagaagccactgaggtccccaccattgacaaagggtcgctgtgcggtgttggtgtttgcctcactcttgggcgggccctgcacagctgagtcatgagctcggcacagcatgtgtgggagtgaggtgtgcccatcagctctgccagtggcacgtgccccttagggacattcaggaagacgcttcaccgagcatttggcatgagtgtggagaggacctgtgcacagaacagcttcaggaagacaaaatgccacctctaggaaacatcttggttttaatcttttgtggggagtggtggccccacagttttgtagaagcttgagggagtggagggaatctagcaaaatggaaatggaataaacccatgatcagactcaagtcaacccagagggatgcagagcaaaggaaataagaaccaagctgcagcgtctccccagaaagccctggcagccctgctggtgggtagggggtgggtctggtcatcggcacaggtgacctggctattttatcagccrgggaacagtaaataacagcagccagtgtctacgtaaccctgacagctgatcaggcatcttcacaggtcttttcctcttttcttaactttccttagggtcatgtgaggtaggaaggagagagctgagttctctttctrtagaatatcctcatggtcgagcggctctgaccaggaagcagcgcctggttgtgaaatggctgcatctggaatataggtgccgcctcctctcctagaaagaccgcaaaggagctttccatcatgtccatttgatgatgaaaagaaaccaggggagaggaaccagtgtggctaaataaatgccacagaactctccttgggcatcccacgcagcatggcacatttattccctaggggccctgggcagtgaagsgttagggtccagttttatctacaaggagattgaggctaagcctaggcaggtgacccctgcgggtcttaaccagccaagtgcctccatggggtcttctgtgcctcctggctgtggcagggagtccttgaaccagcagcccattgtggttaggaacagaggccgtgctggagtgcaaatggcctaccaaagaggtgcctcgtcccacggtggccctggaggactgctctcggaggaacatccaaaactgagccggacctgcactcagagtggacgtggcagtgctgaggcacaccgacacccacagccccatgctcaygcgtggcctggtgaaaacctaggaagtccatgctcttgcgacgtgttcagtgcttcttsgcccsggaaagttccaatgttgaaatgtggctgcactcagtgctgcctgtggatggaattatgaactgtgaaggccagcttcattctccctacatggtcgcatctttcagtgcacttgggggtgtgctgggccccgaccacccctgccgaagtgagccatccccgcctggactctgacacctctgttgtccctactccttaagaggcccaaggcctcatrtcactcgttatccttcccatcaatgtcttttctccctggttgattacacattcggtgagaatgcaattttgcttacgatttccttggatcctcccatatagctaatatgtcatttaattcataggaatccaataaacacatatttattattaaagactccactgactctgtcatttcagatggttcaagatgcctttccctctccagattttttaggaaaaaccgaaacaaagaaaatgcatggaaaagatttatgtgtttggttgggggaggggaaattaaacttctcataatagtttttaaattaaattttgtgctcgtccaaatcctttccttctccaccccttcctctgatattcccttactcattaaagcccaggattttgatggtattcacagggaagctgatttactggaataaagaagttctttaagttttaaattttggaacgttcccagtgtgtctgaacctgggtttcagattttactggcattttgttggcaaagcagtctttggagcccttccttatttgagcgtgtttcctgacacctttggcggtatggtactgtgttttttagatttaaaaaaaaaaaaagcttaaatagaaaagcatatataaacatatacagaagattgattgtaagatgtcaagcaaaataaaacagcagcatacactctcaacaattaacaaatgggaagcattttctttttaacggagcaggaagaggcaagatgaaggcaaagagaccagaaggttcaggaaaccctggagaagggcagctttacatctgggcccattctcctctcctagcagaagtgtccctgttgaaacagggttgaggatacagcccatcccaccatgctgagcctgtagtcgatacctgcagctctcagggccacagacagacacaggatccaactcagaatcctgtggaagggaaaacacacaatggaggggtccccagagagaggagttctgccacctgggcctgaaatagcaagggaggaaatagtattttccaaagactcataggtgggagggagtgggtgagatccagagtcctaaagctagcatcctgcttcttggggaaacctaagagcatttccacagagatcaggaggaacaaggccaggatacacccactgcctccacttctataatacttagcatcatcctggaggtattacccaatccaagtggacacggaagccaactggagacctaagaatcagaaaagaagtaaaactctatctgtggatgatattgtagtatatctgggaaaccttgagaataaacgatcaaactaaacaaacagtacaaggattcagtaagagaacaggatataaaatgtcttgccagcacagaacccacccagaagcacgaatccacccaggtctcaaggggtcagcccccacaggcagagagccgggagagatgggtagaaaatggaattgggggcaagggatggaaaataaccatttgaacgaaaatctgttgtagaattggattccgaaccaggtttcgttcacgggggccataaacccagcgtgtcatggagcaaagccctgcctgaaagaaagaggccccttgtcccactgagtgaagagttaagctggtgctaagcatcccggcaaacgagctctggcgtgttggttgatctctggcagggcggggtgcagggaaggctctgaagagaggtgggagccgagagagggaaagaggaaggtgacacacagggcgtcagggtggtgaaaggcacactggttttcaggccagctggcagggcagggcattcttccttgtcattaccccgaaggcgacggtacctggggtaaaatcaagggcccaagtggccgggtggagctgcccttctgtaggaaggaattcgttaccttcaggttcctttgtttgcccaggtgtttcagatgccccttcactctgtaggtaaagaaacttcttattagtattataatttatgtaaatttcataagggaaaatgaagtatttgaagcagaatacgtacagagctgggaaaataactgttcagacacatagcacagaactgatgaacttggccaccaagctggtagtatttacttttagaaaatgtaaggtgactctgtttcagttctcagaaaaaaagataaagcaagaaccccattttgatgttattatttggaagtcaatttccagatctttctagaaagccttatagcctccaggactgttaaacttacacaaatgcattttaagaggctggccggccgggcatggtggctcacgcctgtaatcctagcactttcggaagctgaggtgggtggatcacctgaggtcaggagttcaagaccagcctggccaacatggcaaaacccgatctctactaaaaatacaaaaattagccaagcatggtggcacatgcctgtagtcccagctacttaggtggctgaggcacgagaattgctcgaacctgggaggtagagggttcagtgagctgagatagtgccgctgcactccaggctgggtgaagagcaagactctgtctcattaaaaaaaaaaaaaaaaaaaagaggtggtatttctaccttgaaattctgttttgataaaagcaaaagattctttcctagtgagtcagaagatgggcctctgagccaggcaaacctggttgactgttctctgatctcaccaggccacttctgcggtgtagcttccacttatcagcagtaaaatgagactacttggcaatgatgatgtcttgagagtcactgggacatttaaatgagaacatggctcataccaagggcccagcatgtggatgggtgctcagtcaaaggaaccactggcttgcttgcagtgtagaatcttgagatctatagctgaagataccccttccccatggcccgttcattcattcatttataagaccttggagaaatcttacagtgagtggaaagatggtgccatgttggctggtgtgctcactgttggaagcctgccatattgaggtggcagtcaagtgtgtgtgtgtgtggatttgtgcatgtatgtgtgtgtgtgtatgtgcatgtgtgtgtgtgcatgtgcacacatgcttgtgtgtgtgcgagacaccagcccttgctatgcttcatggtgctaaaaacgacatctggcagacctgacatctggtgatcgcgaatgaagccactgtagggagacagaacaccaacagggattcagacacactaagtggctgtcttgcacgtaatggcactttgtggtgcacactttgtgtccgaatgccagttctttgttcctttcccctttttccttttcctcgactacctaccaccctctggctctagaaaatgaaatctctccatctgtgggactgttgttgtgccgtcctagtaaatatcaaaataatgcgatgcttcatttcaatcattgaaggaaccagaagagaattactgcctctttgatgttgtagctctggaaattttttaaaagaaatgtagttttaaaaaagtcattgaaaaatagctttgggaacagtggttttagaaccccagtctttggaccagctgcattctaatcatctgggacacacccaagctctggctctggaggttgggattcagagggtatctggggtcttagcatcagtttgtttttgctttgtgttttaaaactgcaggcgattctgatgggcagcattgtttgagagcctagctctggaggcagctttgcctctgtgaccttgatggtatggccaggaacccatgcttgttgaggtgggtagctcctagcaaagactgaggcatttgttaaaattgagcaaaaagtattaatacaatacaaaacatctaaatatgttctcatctgtttctggaggttttctttgttttggttttggtttttttcggagacagagtctcactctgtcgcccaggctggagtgcagtggtgtgatctcggcagtctctgcctcccaagttcaagtgattcttgtgcctcagcctcgtgagtatctaggactacaggtgcctgccactatgctcagctaatttttagtagtattttagtagtatttttagtagagatggggtttcactatgttggccacgttggtctcaaactcctgacctcaggtgatccacctgcctcggcctccaaaagtgctgggattacaggcatgagccactgcacctggcctgtttctgaaattttaatggaaatggttgaggagagtcttaaagtgttttcctttgctgttcggtaatgctccctattctcctctacaccctctccatggaacacgttttgtggaatgttcagaggcctggtcattctgggctgatctctaccagaactggtccagacctcttaaggaggtcaggtctccagcctgtttgtctggagtattaaggtaaagcctcagttaaggttcttatatgtagattcttaaatgtagtccacattaatataaactcattgtcttactacccatgtgctgcaagtacctcacatagacctgtaggtgcaaagatatttgattgagaacaggagttctgaaagctatttcaagaagaaatcaaaaaggtttcttttggaattttcctacaggatcattggcagaaatttttttttagtcttcctcagaaggagtacttcagtggaaaaaggatgggctcatcaaaaatgaaggaaaattttcaaattcattttaatgaagtaaataatattgatacttaaatctgttaaagacagtataaaaattacaggccagtatcactaatgagcatcaatgcagaaattctaaataaatattaactaacagaatctaacattaagacaaatgtgatttttttttctaggaatgcaagattggtttaatattaaaaaaattaatagatctcttaactcattaatatgttaatagatcaaaaaagaaaaatgtatgattatttccatagatactgagaaaacactttataaaattcaacaccctgtcctgatttttaaaaattccaaaaataggacttagtggataatttactgacttgtaagtgtctgtgagtcctagatagcatcttatatagcagggaaacactaagaaacatggcaaggaggcccactgtctccacctctgtttggcattgtactaaaggtattagccaatccaaacagacaagagaagtcaattaaaggtatcattgaaaaagaagtaaaactatctgtttgcagaggaaatgagaaaccttaaagaatcagtgattctctaactcaaacaataagagaattcagtaatagagcaggatataaaattattatacagaaatcaatagtttttatatacaacaagcaataactagttaaaggaaattatgggatatattcataatagcaacaaataagataaaatacgtaagatagtgcataagaaatatgcacaatcaacacaagatcactttaaaacaatctgaaagacacaaaagtatatttgaacaaatgtaagtcatcctttgctcataggtaggacaactcaaaatcacaaagatggtcagttctccccaagttaatttatacatttaatgcacttagactaaaaataccatcaaggcttttttttttttttttttgagacagagtttcacgctcctgttgtctaggctggagtgcaatggcatgatctcagctcactgcaacctccgcctcagctccacctcagatcatcaggccttagattctcataaggagtatgcaacctagatcccttgcatgcgcagttcacagtagggctcctatgagaatctaatgctgccgctgatctgacaggaagtggagctcaggtggtaacgtgagctgtggggagcggctgtaaatacagaggaagcttttctagctttcttactcacctgcctgcctgcttctcacctcctgctgtgcagcctggggggtgggggggtggggcagagctggggactctgccctaatatataagaaactcttaacttttgagttaactcaaaagacattaactggtcattgactgtgtatacacacgcacatgcacagacacacgccactgtccattggttaggctgtagggaaacaggtatctctgcgcggctgtgtgcagtagtgggggttctggcagaatctgataaagctaccagtgtgtttaccttctggctcagcatcccacttccagcaatttaccctgaagatatacctccagcaatataaaaatccatgcgaataagag

SEQ ID NO: 97108 - DNA, 13383 bp, Homo sapiens
ggctgacgtcagaggccgaggccaggaactgagtgaggcccctggtcctgggtctcaggatgggtcctgggggcctcgtgttcatcaagacacccctctgcccagctcaccacatcttcatcaccagcaaacgccaggacttggctcccccatcctcagaactcacaagccattgctccccagctggggaacctcaacctcccccctgcctcggttggtgacagagggggtgggacaggggcggggggttccccctgtacataccctgccataccaaccccaggtattaattctcgctggttttgtttttattttaatttttttgttttgatttttttaataagaattttcattttaagcacatttatactgaaggaatttgtgctgtgtattggggggagctggatccagagctggagggggtgggtccgggggagggagtggctcggaaggggcccccactctcctttcatgtccctgtgccccccagttctcctcctcagccttttcctcctcagttttctctttaaaactgtgaagtactaactttccaaggcctgccttcccctccctcccactggagaagccgccagcccctttctccctctgcctgaccactgggtgtggacggtgtggggcagccctgaaaggacaggctcctggccttggcacttgcctgcacccaccatgaggcatggagcagggcagagcaagggccccgggacagagttttcccagacctggctcctcggcagagctgcctcccgtcagggcccacatcatctaggctccccagcccccactgtgaaggggctggccaggggcccgagctgcccccacccccggcctcagccaccagcacccccatagggcccccagacaccacacacatgcgcgtgcgcacacacacaaacacacacacactggacagtagatgggccgacacacacttggcccgagttcctccatttccctggcctgccccccacccccaacctgtcccacccccgtgccccctccttaccccgcaggacgggcctacaggggggtctcccctcacccctgcacccccagctgggggagctggctctgccccgacctccttcaccaggggttggggccccttcccctggagcccgtgggtgcacctgttactgttgggctttccactgagatctactggataaagaataaagttctatttattctacacatgcctccagccttgctgcctccaccccctcctcttggcgtctggtctgggggcttgggatgggtttcgtcatgtgctctgggcctgtgatggccaggaatgagcactggggccaaggggctggccagggcacccttccaagctgccttctgaggcttaccttgtgctggggtctttggagatgctgagaaggagaaagtcctgccccttgggaagccctcagtctggggatccacactgcccatgtcaaggagccccagtctgggagtgggagagaagaggaggaaagctgcccccaccttcagggaacccccagtctgagggaggaagccggagccacccctagacatttctggtccttgggaagccttcaccatcacggcaggaatgacagatggcacaggagctggggtcagggactcatagaaacctaacaagaggcctggcgcagtggctcatgcctgtaattccagcactttgggaggctgaggtgggcggatcacttgaggtcaggagttcaaaaccagcctggccaacatggtgaaaccccgtctctactaaaaatacaaaaaagttagctgggcgtggtggcgggcgcctgtaatcccagctattagggaggctgaggcaagagaattgcttgaacctgggagctggagcttgcagtgagccgagatcgtgccattgcactccagcctgggcgacagagcaggactccgtctcaaataagaaagaaagaaagaaaaagaaagaaggaaggaaggaaagaaaggagaaaggaaagggaaaggacgaaagagaaagaaagggaaggaaagaaaggacagaaaggaaagaaagaaagaaagaaaagaaaaaagaaagaagaaagaaaggaaagaaagaaagaaaaagaagaaagaaacttaacaagaacacaggattgggatggaagctgtgggggcctagccgggagggagtaaggcaaagggttccttctgctagaggctgcctgccatttctacattaaccaccaggtggcggcagcgccttgcttgactcaccggccgccctaggctggaggcaaccgcggggaccgaggcgcttttcctccagtaaatattttctaacatctttacgagtctgaaatgaaatctaacatactgtacctgtacacgtgatttcacagatcaatatgttgtcacaaccgtattataaaggataaattgaggggcagtgctatgtgtttcaatagattaatgcttgcccctcttttgaatgaatacatttggatttaaaagaaggttggaagccattctgtacaagaagcccaggaacattaaagagcatgggtggatgttggaataaaaatcggcatgtttgatctataataaaacaatgcaaaaaaagcccaaacaaaacccttaatggttttttctttatcttttcttttcttttattttttgagacagagtcttgctgtgtcacccaggctggagggcagtggcgcaatctcggctcactgcaagctccgcctcccgggttcacgccattgccattctcctgcctcagcctccccagcagctgggactactggcacacgtcgccacacccggctaatttttgtatttttagtagagacggggtttcactgtgttggccaggatggtctcgatctcctgacctcatgatccgcccgcctcggcctcccaaagtgctgggattacaggcgtgagccaccgtgcctggcctcaaaacccttaatgttttacatgtaaaacagggtttgggcccagggttttcacttatgccaatgtccagttggacattctaaagttgtgcctgaggctgggcgcagtggcgcaagcctgtaatctcagaactttgggaggcagaggctgacggatcacttgagtccaggagttcaagaccagcctgggcaacatggtgaaaccctgcctctacaaaaaaaaatacaaaaattagcctagccttgtagtgtgcatctgtggtgtcagctacttggggggggggctcaggtgggagagttgctggatccctggaggttgaggctgcagtgagccgtgataacaccactgcactctagtctgggcaacagatggagaccctgtctcaaagaataaaaataaaaacaaaaaagttgtgccaagcaggtttttatttcaagaggatatcttgacgtccatagcccttgcccactaaatgccaatggggtcccccatcattgtgaaaacaaagcagtggcccccacatttacaaaatgccccttggggtagtgcctttgctgtttggaacctctagtcttggggttgtcctcagtggtccacagttcactgctgtcgagcagagttgctcagcttcagcaccaatgtgaagatctgagccaggttgtgggggctgtcctgtgcattgcaggatgctaagcaacatctccaaccttccgcccatgaaaccctagtggtgcttctctcccaccccagctgtaacaaccaaatatgtctccagacactgctaaacgcccccctggggggcaaaatcacccccatgtgagatccactgctgtggagtgtggtcctccagggctgatgtgctttgcactgagccagggcccatcctccgcagagagactgagccagaggaaggtgaccgggatgccacctgggcagagctgcaacaggcttgacaggcctacgggagtgcagggcagaggcactgaatcacgcttggggcagggctcagaagccttcctggaagaggtggcctctctcagctaaatctctttttaatttagttttatttattttgagacggagtctcccgctgtagccgaggctcattgctaaatctctagaggaaagaattggctaggtgggtgcagatttggaagacttagtatgaaaaaaagaatgtaaactatctccttaatactttttaatatcaatgaggcattaagatgaaaatactttgggtgtgctaggttaaataaaatacgtgactaaaattaatttcatttgtttccttttacttttttaatgtggctaatgaaaaacttgaaactacatacatggctcatatgctatttccatcggatgatgctgatcttgaacatcttctgacacacagtaggtaccctacaaatatttgttgaatgaatacatctggaaaacagcggcacagccccatctgggtttgtgtggaggggtctgggttgtggacacagaactgtcatcagagagatggtgcccaccatagcatggatagtgttcgggcatggcagtggtgtaggcctggggacaccttcagtttctcatccaacacatatttactgagcacatactacgtgccatggaaggggagagagcaatgccatcctgcaggagaagtgctttccctacggaagcgaggggcatccagctctgtcttggggtgggggctaccaggggagccctctccttgaaggtgtctgttttcttcccaagtgacaacaataggtgggtgggcattagctaggggaggagaaggctgcaggaagcagcggctactctgggcaaaggaacagcacgttcaaacgcttggcagcaagcaggtctggtgcttgttagaagagaaaattccctatggttctgagcacacctggaagccggtgctgtggagtcgaaggcctgacaggggcagggcttcagaaggaagctttgtgaaggcgcttgactcaccctgagggcaggggtgctgccctcagtcccgggtttaagtggggggcgctattcagaaacacctcccactgctgtgtggggcacaggagagctgagaaagacgccaggaactcagaaggacagggtggggtgatggcggggaacgcacagcctggtaggcaggatgcggtgaggcccgcaaggtgcagtccgatgacggcccctggatttctcgcttaggtcctgggtgatcttatggagagcagcccactggctggtgaagggggagggcagacgggaggggagacacaggagggggatgcgctgcataggcagcagctcttcgaatgcccgcaagtaggaagaagggggtggttggaagggaaggcagggccgggagcgcgtgtgttttgggagctttctcctgaggacagaagggactttcccgtttatagcctgggggagcagtagcggcggggaggatgaagatggaggagggaggcataacacacgtctgggttgccctctggcccgccgcccacccccaccccacctccatgaaagcgcccagcccccgccttgccacaaggggtactgtgaggatgttgctcataggctcccgaggattgaggactgcccggggaaagggagcctctcctcctcttccctccctgggcggggtctcttgggagggggggacagacctcctgtgatgccctggcaggtgggctgggttagggtggtagggagggagccattgtggctgcagctggcatcggatcctggccacccccgcagtgcatatcagagatcacacacacacgcgtgcacacacagaggtcacgccggatgtacacatgcacacatagcgcacaaggatgtttctgtgtacaggtgtgcacacgcagcccacacagaatggacatgtgcgtgtgtgcacaatgcactcacacaaagctcacagggatgtgagtacacagctctcaaggggcatatgtttctgtgtgcatgtgcacacagctcacccgggagggttacgtgtgtctgtgtgcacaagtgggcctcacgcagggtgtacacatgcgcgcacatgcacagcgctcacacagggtgtacaggtgcgcgtgcacacagctcacagtgcttatgtgtccgtgtatgcacactcgcagagagcccacagggggaccactctctctctgaacacagagagtgcctgagaatgctggcatcacagttgtttttgtccccagtaaaacaaccactctccaccttccgctctgttctccccctcgggtccactctctctcagggtcctggtctccttcctttccacctgggtggtggcatccaggacctgcctgagttcattctccgcccccagcccggcctgccccaggtgccgccggcagccactgggaggcagtacgaggcaagtgcgatgccgcccgcgggccgtccccacaacgcgtctcctgccggggcaggtcccgcgacagctctggtggaagcagcttccggcttctgcggtgcgggcggaggtggcggggtccggccctcgccgtccagtccgcgcgaggcggtgcccgcccctagatggccagatctcggcggccggtggccggtgacgccttgccgcggccgctgccgcactcgcggaggctggccggcgccgggtgcgcataggccggcggggcgcasggctcggggccggggcgccgggagggcagggccggtggcggaggtggcggcggcggcggcgggagcagcttctgcgcctcttcgtgtgcacggttgcagcggttgtcacgctccccggcgcgcgggcggcccttccagagcaggtggcccagctcggctacgctgagcagcgccgacagcagccccaccgcgaaatagaagagcacgaagacggtcttctcggtgggccggctcacgaagcagtcgaccgtgtgcgggcagggcggaccggcgcacgcgaagtgcggggccacgcggaagccgtagagcagcgcctggccgcccaggaaggtcagctcggccagcaggcgcagcgccacgctcagcaggtagcagcggcgcgcgcggcgggcgcgcagggcgcacggcgcgcactgggcctcgggcagtccgggggcgcactgcgccgccgcctcagcgccgcccgcctccttgcctgcccggtgcatggagtagacgacgaacagcaccgggggcgccgagagcagcaggatgtggaagagccagaagcggtagtgggagaccgggaaggcgcggtcgtagcaggtctggcgacagcccggctgcagcgtgttgcacacgaactcctcttgctcgtcctcgaacacggcgccgcccaccgtggccagcaccaggatgcggaagatcagcatgaccaccagccagaggcggcccacgagcggcgactgcagctgcacggcgtccagcagcgagcccaggaacgcccactcccccatggcgctggggacgcggggcggggagtcaggggatggggcaagtcagggacccctgccccttccaagcctatcggggtggggtccgttggaccttctctgacttcagggtgagtcgtgaggtaggagaggcccgggtttagcgatgagaccagtatgaaacggagggccacgggagggcccgaggggagcaggcgacgctcagctatgggttaccttctctttgggaccgatgggtgctggggaggatcccccatttgcattttagccgcaccccctgagccgtctccgttcgaccctgggatcctccagatcccagattcttaggaaggaccttggagatcagctggaccagcccctgacttgcctggtttcggaagcggaaacccagcggtgcccttagctgtcaaggatgctgtgggaagagtggagcctcgaacccgagacgctagacccaatttggtgcccatgggaggagtgggagtggcagaggcagcgagaccactcctttcttggcccaccatttctctcaccatttttactgcagtgaactcctctcagggtggggggctggtacagaggcaactccgctttcataactctcacagggtcctttgtcggaggtgtccctgccctcctaccccagcgtggtgggagtgcgacgccaggcttctccctcctccctggcctcctgtgcctccagcctccacatctcctgagatcctccccaccccacacttacacaggtccccacacgcccctggtgcccctaaaccgccacccaaccccactcaccctggggccgggactggggtgtcagagctgagccagggaccttgggaggtggctgggaccggcgcctcctgctccctctttcattttccctttcggatttggccaggatggaggacaggacaggatggctgagaggggctagcgctcccccttctcttaaaggaacagggtgaccctgctggctggctccgcccttgggaacaggcacggaccacgccccttgctgggctctgtggccctcactctttagctaaatttccatctggaaatgggggaggggggtaaccagagccacatcctttatcgaggaagctgggggattcctagaagcccttcccagacagaccctcagtctggagcctagatccactacgcactaaccatgccctgtgaagatggtcttcggggacagagggaggtttggtgctggagtttaaggggcagcaaacatctaacagcttctggttccagctctgccaccgctcaccttggacaaatcattcggcggtactgagccaggctttcctgccttgtcaacaaaggcggccagtccagctgacccccaagtttccttccagctttacatcttttttggaacggggtctctctacatagcccaggtcgatcttgaactcctggcttcaagtgatcctcacaccttagcctcctgagtagctgggattctctacttcttaatattgaattcccaaccatattacagagaaccaaaaaaacccttgtgcctgcaaaaaaaaaaaaaaaaaaaaaaatcccatatggaaaaccattaaaatatcccaagtgcctggctttgatagttaaataaaatctttggtttccttcccacttttctgttatttccagctttactataatgaacatgttatttatttatttatttttaatttgtttgttttgagatggagtctagctctgtcgcccaggctggagtgcagtggcatgatcttggctgaatgcaacctccgcctcccgggttcaagcgattctcctgcctcagcctccccagtagctgggattacaggtgtgcgccaccacgcccggctaatttttgtatttttagtagaggtggggtttcgccatgttgaccaggctgatctcgaactcttgacctcaaacaatccgcctatctcagcctcccaaagtgccgggattacaggcgtgagctaccacacccggcctaacatgttattttattatttatttatttatttatttattgagacagagttttgctcttgttgcccaggctggagtgcagtggtgtgatctcagctcaccgcaacctcctcctcccgggttcaagcgattctcctgcctcagcctcctgaatagctgggattacaggcatgtgccaccatgcccagctaattttgtatttttaatagagacaggatctctccatgttggtcaggctggtctcgaaatcctgacctcaggtgatccacctgcctcggcctcccaaagtgctgggattacaggcttgagtcaccgcgcccggcctcatgttattttataatgtgaaaaataggactttttccccccagaaggctctgaattgagagttccctcctactgccctgggtggcgggggaagctgttttatggagaagggagtaagggtgaccgacggtgatctgagtggtcagggaggggacactccaggctgagatgtttggttgtctgctctgccttcctaggggtccgcctgagtgcatagcaaaacccgcttcacctatgcacctgctgggccagtccccgtgtggaaccccgttagctccatatgccaatgagctcattcgattctctgtcaatggtggcatgagggcactatttacaccaggggaaactgagactcagagggtctaagccacttgcctgctgtcgcgcagccggtaaatagcagatccaggcctatgcgaggcccaactagttcttgagcccaagctcttgagcctttcatggaactgtcctccatccagcctggctgggcttcccaggtgctgtcccagggcctgacagtccccaggaggggttgcctctatgccagccttgtgtggggctggtgggtgcaggcactggagggaggtcatgcctgcccctctgaagaagggcagcaggactcacctccttggtcacagttcctctccctatcagccatgggtgcctgtgtggttttccatatgctgacgcagacccccaggtccactttcaggaaggggaaggcacgtacccttcacccaccactccctccagctcaggggcccagcccccgcaggaaaaactctaggtaaactcctgcttgtgtgtgttggggaaccctcctgccctcgtgcaggcttcccttgggagtgggcctgggtgggggacgctgccctggagaaagtccaagggaaaaagcacatgctggagccccagattctgaaaacaggatgtgggttgggggcgctgctggcctcaccctcccgacctccctctgcccctggcaaagctgctaccggccccctgcccccagccacaggggctcagggtcacatctcatctcccttgactgtccaggaatggtccccaccccgtcctgtcccgtggctcctgctgggtcaggccattggcgccacctggaaaaagcccatcagccctgcgggaatggaaagcagctgaggcggtgggccagggtggggtgggaagtggagagcctacagtcaccctgtgctgtctgcagcctgtgatgccacagggccagacccagagactctacaatctcaggcccggtcctccttccctgatagcgccatccagcctgagaggaggtgttgctgacgctgcctccatctggcagccggtggcccattctcggccatgcctaaagactggggccgggggctgggtgcagtggctcacgcctgtaatcccagcactttgggaggccgaggcaggcggatcacaaggtcaggagatcgagaccatcctggctaacacggtgaaaccccgtctctactaaaaaatacaaaaaattagccaggtgtcgtggcgggcgcctgtagtcccagctacttgggaggctgaggcaggagaatggcgtgaacctgggaggcggagcttgcagtgagccgagatggcaccactgcactccagcctgggcaacagagcaagactccatctcaaaaaaaaaaaaaaaaaatctggggctgggctgagaggccaatcctgcctcgctccggtctctgttccagacacctctccctggccatcggattgtggggccactgctcatgtaagacacacataggtgcacgtatgtgtttgtacccagtaactatcagccatggtcaaccccaccatgttcttcaacatcgccgctggcagtgagcccttgggctgtgtcgccttcgagctgtttgcagacaagtttccaaagacagcagaaaactttggtgctctgagcactggagagaaagggtttggttataagagttcctgctttcacagaattattccagggtatatgtgtcagggtggtggcttcacacgccataatggcactggtggcaagtccatctgcagggagaaatctgatgatgagaacttcttcctgaagcatacagtcctggcatcttgtccatggcaaatgctggacccaacacaaaccgttcccagttttttatctgcattgccaagactgagtggttggatggcaagggtgtggtctttggcaaggtgaaagaaggcatgaatattgcagaggccagggagcgctttgggtccaggaatggcaagaccagcaagatcaccattgctgactgtgggcaactctaatgagtttgacttgtgttttatcttaaccaccagcccattccttctgtagctcaggagagcaccctccaccccatttgctcacagtatcctagaatctttgtgctctcgatcagttcgctttgagttccctgttttccttgttcctttccatgcctagctggattgcagaattaagcttatgattatgaaataaaaactaactaaataaataaaaataaattatttgtaaggcctggcatggtggctcatgcctgtaatcccagcactttgggaggccgaggcgggtagatcacctgaggtcaggagttcgagaccagcctggccaacatggtgaaatcccgtctctactaaaaaatacaaaaattagctgggcatggtggcacatgcccgtattcccagctagtcaggagaattgcttgaactcaggaggtggaggttgcagtgagccaagatcgtgccactgcaggccaacctgggcaacagagggagactctatctcaaaaaaaaaaaattatttgtagagatgagggtcttgccatgttgcccaggctggcctggaactcctgggctcaattgatccgccagccttggcctctcaaagtgctaggatcacaagtatgagccaccataactggccacttattttttattgttatttatttatttattctatttactgacatccttgagccatcacactgctgttttgtctcctgtgccctgctaacattttaaaaagtccttacagaaatgctgtcttttcgtgaggctttccccagctgccctagcagaaatttacccctctgtttcctgtcccttctcagctttatttcctttgtattgactactacataactatacacacacacacacacacacacacacacacacacacacacacacatagagagagacggagcctcactctgtcacccaagctggagtgcaatggcacgatctcagttcactgcaacctccgcctcccaggttcaagcagttctgcctcagcctcccgagtagctgggattacaggcacccaccacaacgcccggctaatttttgtatttttagtagtgacgaggtttcaccatgttggccaggctggtctggaactcctgacctgaaataatccacccgcctaggcctcacaaagtgctgggattataggggtgagccaccgcacctggccaattttatctttttcttatgtatcctgcttagcgtccatctctcccaatagcacaggtgatccacagggaaggaatttttggtgctctgcttactgtcccatccccagcacctagaatggttgggggcacacagtggatgctcagtagatgtttgttgggtggatgaatgaatgaagtgggtggaa

SEQ ID NO: 97109 - DNA, 91831 bp, Homo sapiens
cccttttaacagaactcctctagagagtcgtctacactgatgttcccacctctactctatttgtttcctctccccaccactccaaacctatcaaggtcactcacaaccacctcttatcaaagccaataggaaactctccagcccacgaagaataagaagaaaagaacccctcggtgtcttggtttccaggccactagactctcactagtttcttccttcttcaaacagagtccttttcaatggcgttgctagaccctccctcccaatgtggaccgcttgccaaaagctcccaggccattcctcatctcctgctcctctgtatccatactgtatgcctcatagatcagcaatatgcaaatgactcccaaatttacatatttggccccaacctcttcttgaacctgaccttgaatttccatccatattcacctttctctactcagataactaatcataaaaataataagcaaagtaagccccattaaatactgttagtcaggtactattttaggtactttacattagcaactcaacaaccctgacaagttgcttttattcttcctaatttatagatgagaaaactgaagcacagagattagactgcttgctcaagatcatctaggaagtagctgcacaatgacccaaccctcgtcctccagatctggcccttgagtggagctgctgagctgggctgccttccagtcacaagctccacatgttcaaatcccaacactggctcttcccagacttccctatctcatacctggcaccaacgccaagtcaaaagctgagttggaagaatcagattctagatgtgaagaaatttcagaattactttattttacttgtattttccttttttatgaaagtgcatgaattatatgattttaaaagtcaatgcttagtctaagctctttcaatgagtataaatgaatgctgggtaacaagaaagcattgtgtcacaatctagttggctacattttccctttgttagcagcataagaaatgatgatgcaacttaaaaatgatggcatcttacaaatgctgaaattcagtaggctgaatctgatctcaccacttccgccctggtctgaggtgccggtacagtcacccagctttcacaaaagtctaactgatctccttgctgatattcctcctccagtctgcagtagtggaggtgcaaaaagcaagctgcagtaaggaggtaagggtacatcctgccattgccacttcctgtgtgaccttgggtaaatcacttaaccactctgtgcctaggtattcccccctgtaacatgggaataatgataataatgcctactttttggactgtcataagaataaatgaattaatatatgtaaagctcttaaaacagcctggcatattgtaagcccaacagccagagtggtactttttaaagataaatcagatcatgtcattcgcaaggaaggaagaaaggctcccttaaggcttcccatcaaacttaaaatctaaattccttaccacagcctgtgtgctccaagatgcagctctcctccactcccatctcacttcctaccactcgcccagcctctctggcagcaatggcctccctgaggtgaccaccatactacaaggaggctcagggactttcacccgagagttccctgtgcctgagaggctgctgctgccgtgacctcagcccagctcactccatcctcaccacctatttgaccttctctcacctaccctgcctcatttgccctttgaagcagttaggacaccaaatgcttgtttactgctctcctccttcccaagaaaatgaaccgcttgagggcaggaactctcctcatcaggctcatcctgaatctccaatacctagaacagtacctgggccaggatgcatgggtgaatgcctgttggatgaacaagcaaatgaaatggaaccaggttccaaaatcaccaaactagaagcaagtagagcttccatttcactgtacttccaataaaaatacaaggtatctcagagttactttcatcccccttcctgttccatcacaaagacgttaaacctaaaaccaaagtcacttttctttgtgtacgcctaggacatcttataggcatacaggtggaaaagtgcagcaagcagtactaatcaaactaccaaaaaaaaaaaattgtgataatttgatattaatggccctagcccaacagctgtcaagctatggatgaagcaaaactctgcaaatggaaggtgcggtaagccctgccacgaagacctctgtgggctactgcgctgtccctgtccacaccccagataaaaagctgtcaacttggaaagaaaagtcactcaaggaataaggaaggaatcttaatgatttcactggacaatttttaattttcccatttgcttttcctacctcacatattatgaacatacaaaataatatgggtttttttttaacaccatttccatcacaccaaattacagatttagaaattcctattttagaaagttgacacagaaaaccactgagttttctttttcttttctttttttttttttagacggcgtctcgctctgttgcccaggctggagtgcaatggcacggtctcagctcattgcaagctccgcctcctgggttcacgccattttcctgcctcagcctcccaagtagctgggactacaggcgcccaccaccatgcccggctgattttttatatttttttagtagagacgggttttcaccgtgttagcaaggatggtctcgatctcctgacctcgtgatctacccgcctcggcctcccaaagtgctgggattacaggcgtgagccaccgcgcccggccaccattgagttttctaataaaattggacctctctgagctttttggtttcaaactaagcttgataactttgctaaacttttttataggctggtaaatgtgtaacttcatctatttctttccaaagttaactacctcctatttgaattatattgtttgatcacagagctaatcacagcattcaagggaataaaacccagttcttaagtaaaacttacagctaagaaattttgataataactaattagtaggctttgcttgtacccacgtgtaagaatatgcactatagcaaggtttgtcatatattaaaacatatacaatacacactttgactcctgctaggacaatacacaattgggtgcagcctttgaaccaagtgcccagggatggagtggaatgaggctttacctttctgtaggtactgtgtgcttgcttatctttttaaatctatcaatacaaatgtactgctttatgccagaagcatttttgatctctacctatcttgttaagtactgtatctcctagggcctaaaacagggaaggcctagcacataacaggccacagacaagtatttgtcaaatggattaagtttgttttatgcattcactggacaaatagaagttaaaaaaattcttattccaaaaatctaaaagaattcaaatgttttacaatacataaattcacgaggaagtgaaattagcctctgagccaagatgttttttgtggatgatgttatcacttcatagctaatccttcccccttggcctcccagtaacaactgcatgagcacgtcacaccagagacacatgtgtcatcaatttctcagagctggatcgattatttttaagcccctgtccctgcaggagggcctccttttttcctttccaactacagcttcaaatgtgatgtagatgtagtgggatatacccagtcttaggaaccctcagacatctaacagggcatcactcacagacaatgcattcctttcagagtctgtgtgagttcatcctctccaccacaggcaagatataggcacccagctcagcctgtctcatcaaatacttaccgagcccccgttgtggctgtccatgcatactggaccctgtcctccggaggaaccgcgcaatgagagacagttaattctcttatccaagaaggaactgtatcagccaagcttttatcctttcttccttctccctttcccctctgggaaaccctcagcaggcaaaaaggatacagcagtctcaaccccaaggaaaagatggtcatcaaaagacaattagcttttctatctcctagaaacaactgctcttaagacaacctagcgttttggaaaatgcagctctgggtggcacctttcgaagcaataaaacatacggcaaaatttaagaggaaacaaagaggattaaatacatatttgtattctcaattaaaaaaactacggttctatcatcttaattatggagttaaacgttaaagaaacaagtttgatatcatgccacttttcgttatacttcgagaacggaatgcaataatggttagtaagaaggaagtaaaatgcctgtatcagaagtaacagcccaaacctgctgaccaaaaatattaactgggaactaaacaccacggtgcagatctccgacatagaaacctggacaggaacacgttttaggttaggttttccagcgtgtaaatcgggactccaacacgtttcagcgtccacagcccaatctgacaccttccctcgcacccatccaccacgcaataattttccttctgatgtgaacacgtcaaaagtcacctcgggcccccaactgccccagattgctcccgatcgctgcagacgcccggcacccgcaggaacttccctggcccgggccgcccgcggcgcagagcatcccgcgcggacactgcgccctcggaaggacacgcaggaccgtccagggcgcagactcgtccccaacgcagtctccactcccgtggcacagcgtcccctcccaaggcagcctcccctgcccgggcccagcctcatcccgggcgcagcctgccgtcccccggcgcagcgtcccatgccgggcggagcgtctccccagggacatagcctaccgtccccaggcgcagccttgttgccaacgcagcctcccgttccccggcgcaaccttgtacccggggcagcctctggtccccgggcgcagcctcgtccccagcgcagcctccgatctccagggcacaccgtcccctccccaaaacgcagtctcggtccccagggcgcagcctcgtcccggcgcacctgccctccccgcggcgcagcgcggcgcatcccacgcggactcggcgccctcgggaggggacgcggggccgcccgggcgcagcttcctccgggagccgagcgccggagcagacgggcgacccaggagggtgggtgcgaggcggtgccgcggcaccctcgcttctccgcgggcgccctccgctcccgggacggcccgcagctccggccccaccaccagtccctgcccggcgcttacataaacgccgccaccgcggggtccggagcccgcgcccgcccgagccgccgcggccccgcgccgccctcacctcagccgcagccgcgccgcgcctggtcctccgcacgcgcgccccacgcttcggccgcagtctcgcgccgggcggcgctctgcctcgttggttgtgcgcagcggcgcggcgtggccgtggcctcgcgcggcccggagccccggccgccaacctggccgcttggccgccgctgccgccgccgccgccgccgccgccacggccgcctcagcgcctcagccccgccgccggcggctccgccccctccccgcccccgccggcccgccgggcgcgcgcacgccgagggggcgggggcggcgcagcgacgccggacgtgcgcgcgctggggcgcccgtgtctgtcgtgggcagccggagctgtggcacctccctcacgaccacctgcggcggacgggcgcggggccgttggggctggagcgcggccggagctgagagaccgcggctgggcggctccggagcgtggggcgagagcgcgggaccggcctggcgtcgcggcgccgcccgcccgagcgcggctgaggagactctgcccgccttcgttttggggacggggtctcactgtcgcccagactggagcgcggtggacctccgagctcacgcgatcctgccgcctcagcctccctggtagctgggaccgcaggcgcccggcgattggcgtttgcgttttgcggaggtggcgtctcgcggtgctgcccaggctcccgggcccccgcgctcctccctgcagcgggcgctgcccccgccgagcccccgccgagcccccgccgagcccccgccgagcccccgccgagcccccgccgagcccccgccgagccacccctgcttctccctctcccggagttgcctgggacacgcgggtcccgccggccccctctccccgcccgtcatcctcactgtagactccgggagaaccaggtcgcggcccaggaccctggctggacacggttcccgccgtctcctgtttagtccgcactgacactagcagctgctccagttaccaacgtttaggtgatggtggttttgtttgattttttttktttgtttgtttgttttagkttgatagtaaaagcatttttttatagcatatgcaatagamctactcttcgatttatctatatttactgactgttccacagttataccaagaaatgtttacacagatgatgataagcatatgtagaaatgcaacgttttcactgaccggaataaccagctccaggctgcagttctctgcacgaagataaagtttgataggcaaacttggcagctcctgaccgcggcgacctgagcccagaggagcagccgggggcggtgggcagagccaggtgtggacaagcgggtgggtcccgcacctgggtgggggaagcggcaggttccagggtcaaattgaggttgtactagccctggcctccaaacctcaggcggcccactctgccctcggcctctttcctcccttgtaaagtggggagtaagagaccatcgcaagccagggatggggtggcgcacactgtgatctcagccagtctggaggctggggctgggcggtgggggggtgcgggtcgcttgtgtctcagagctggagctgtggtgtgcgaggccgaggtccgcgcctataaatggccgctgcgctctggcccgggcaacactgagactccgactctggaaaacaacaaaacttaaaagacgaacacagatggaagtttgggagcytggtatgcggtaagcactccgcaggtgtcagccgccagcccgcagtcccggacaggtcaggggaaggcccgcggtatgcagcaggctgccggcttcagtcactgcstggtggaaaacaagcctgtctttggggccagccagctaacaagtgagcccttcaccccatctgaaggcgaagcacccaaaggggcaaccgtggacggctaaataaaaatcaagactcctgggacgccttctcgggacacattcttaaagagatacgtgcctgaggacgttgtgtgtatttctgtgtaacaggccaccccaaacctcagagggcgaaaacctctcttcactgctcatgactctgtgggcctgcagcttaagccggttcagctgggacggcttgcctcggctccatggggtgtctgctgggcccacttacaggcaggcgccccgggcagatccgggccacatgtcacccacccaccgcaggctggccgggcctccctcccgtggtggctgggctccgtcggcagcaagaaaaagcaaatccccatggtgcttccctccatctccccaggagggtgagatggccggggcctgagtggacgtgaggcacygcacagrggacgggcacggcaagcatggttcatcggggctgtcactgcagaagtcttccacaggccttcrctgaggtgcgggttggtgtggggaatacaagggaactccccagaatggaggctgcttgtgyaagtttcaacttgtcctttttctccstccagagcagcagagagcggatggcgcccaaggccgggaccctctgctgctcccacaggcctctcaggcggctctgcagraccagccagcagcctctgatgctcccttcctattccatggcttcaggtgccatcctctccacagagacggtttctattgtgacgctctccctgacttggaagaatggcactgggaacattccccttggtgctgatgtcggggaggaaagcagtttccagtcgcctggggccaggacatggcgttcccagctgttgtagagcatgaagcaccaggatgcccattcgggtgcctgctgagatcaggctctttgagaaggaatcctgtggtcgcctgaggaagtccaaaaaaatttcgaggacatctcagccatccatcccctgttcactgtggaggttgaacaccggggctcctggaggggggccctgggtctccacagaagtgctggcagccaccatccacttcctggccttccgtgcccgctccacctctgttctgttgtttactgtctcctttgtgggaattatggaataaacaatcactctggtgtcctggaaaataaacctgatgctggagggcttgagtgtaggaatccagctgggctcccactgtctgccccagggtgcggagttaggctttgcataagcatgtgagatgccaaccgctatgaaatgtggtctacacagcaccaaaaatccatttcccacgttttcccttcagtgcagttaaatggcatgaccctgtgactgtctcccacgagaagaactaaaaattacgctggtcctgccaatgcctacaggatacggtggcacaaaatgatttccacggtcttaggatatagacccaggccgactcgagagattaagtggatttcaaactgtggtmttgagccttctgggaactgcccgaaaggaggggaaggcgccagcctcggagtggtccagctgcccggcctgttcacacactggcctttcagttgaagacagtgttcaaagcttacccgtgtaaatgccactgatctgtgaacccccttcctgtcatgcccaggrcctggcagactgtggctagaasggtgggatcagagcagtgggtcacgtgacctgcgcacgggtgtgctggcctccctgggccgcggtggccaggacagccttcctttccctttccagccacacagggcaatccgtgtgctcagatttctgtctcatcaattacagagcgagctgccaacctgctgtgctgagactgtggcctggtcttggtcctggtgtcctagggctgatgactgaccacagcctttgtgcttttgaagcctatttgactatagtccttgtgtgcaactaaaaatgtagctttaaacaatcttgctttgttttaattctgcccaatctatttgagaaaggacacwcacaggtactttttagattgtagcctaaagtggattattgatttccttgtttctcaaacgtcaggaggagcataaaactgctaataagaggtgaccaatattcggtgataccgtgatttgagacataatattttttgccctatattttaaaaataaaataagaagacatgagactggagtggcaaaaaccagatgttgccaaaccattcagtcagcagctgccatggtggtggataccatgtgtgagacctgcccagctcacaatgtgccactgtctctaggacaactcccaactcccacagtgacacagcaggaacagtctgtctgtgctctgtgacaggcacacagcacacccccccacaacccactccaggacctcaggcgggattctgactcccaggatggccctgggtgcttagagctagcattgagacaatcgtgagtctctctttgtgcctaggcctgaagggttcaaatccagcacaattaggatggtctccatcactggccagcctgaagagagaaaactggggtagacacacaggggcaggagagagaggacgaactgatggcctttcagcgccgtaggcagtgtcacgtgcataggtcaacacgtggccaggaagatgtctttgcttcagggcrttcatgttctagtggggagatggtgtcagggagcagtgcagtgtgttacctgagacaccgtccagggcaggaacagaggcgtgacagtcagtgcggacctggctgtgccatgcagcactggccaagttgtttggcctgtctgagcctgttctgcatccagaagagggagacgatgggtggaaaagctccagtggtgatgtacaaatgcaggctcctaatgaagaggagtgtgaacggttgcaggagtccagggcactgcagctgcaccgctcaggagtgtcagagcaagctgcaggaagctgcactgagccttggaggatgagaaggcactgacggcgggaatgcctgtggcagaggaaaaatgcaggaagctgcattgagccttggaggatgagaaggcattgacagcaggagtgcctgtggcagaggaaaaagcacttccatggcacatgaagtcagagaagagaggaggcttctgccaccattggtcagaagagtcctcctggtcaggccactttgcactctgtagagaccagggaaagggaatgtgctgcgtggttaagtcagaggtgggcaggctgagcctgggcccagtggtgtccagtcaacagctaagaatgaacattaaacatgtaaagtgttggggtgggtgggggcttatgaagaatagatgcagtgggcttatgtggccggtagagccatagatctttgccatctggccctttgcagagaaaggcaatccctggtttagccaagtagggcctagctctggaactgggaggtggagcagctgccatcgaagtgcatagactgtctgggggtgggagaaacacaacccaaatcagcaccccggtgaggggacggaggctctgacttacccggcggtgtctgcctagagctcaggcatgcctgcggcttccatgcagaagaccttcatcaggtgttgacagtggaaatggaaagagttaagaggcttttggaattagactcaacaggacttagtgatagagtcactagaggggtctggggaggagaagcatcagggcttacccaggatcctggcttgcacatattggcgggtgatggtgctctgggatgacacgggggatggggggacgaaaccaggcattccttttgggtgcgttaagtttgcgatgcctacaggatgtctgagtggctgtgttgggaagatagctacgtacaaaagactgatgtccggagaggagagccgtgctggagacggacacttgaaacccttgaaaatggaagacgtcaccgatcccctaaagagagaatggagaaaggaaagaagggaacctggctccagacccgaagagcctcagcctagcattagaggtgagcatagagagagaagggagtgtgggaggcgggaaggcccagcgaggcaggagagaaaagacggaagcgtgtttctctggaggccraggcagggggactgcttgaggccaggggttggaggcttcagtgagctaatacctcacacaggttgtattcttttgtgtcttgattatttcacttgatcatgtataaagagaggaaagggagacataaatatggttatgtaggcagataattttaaatctacagccaaagtcttagatctaattaaaattcagcaagattattgggtataaaattggcacacatgcacacacccccaaaatgatttctatatatcggcagcaaacaacgtgtaatttggaagatgatactgttcaacagtaacaaaagtatgaactaaaaatagatttaaaaaaaagtacatgatccttaaggagaaactcatttttaaaaattattaaaagagcaagcgaatatagagacacaccaaacacctcaaattctttgtgggatgagtataaatatataaagcaaacaaaattagcagcttcaccaacttcttttgaatgatactagatttttaaaataaatcagatgcaaaaacagtatggctcctggyaacatactactctaaaataatggackagagccaggaaaaggagatttttttttctattttgccgagttatgtcttaattattatgttagcagtctttcctgagaagctaaaaggtaattagcaactgaagccaggcaagagtggggaggagggagggcgcgggcaggccgcgctctgctgaatctccaggagctgttctggaggggatggaggctggaggctgagcctaagtacagttgggttagtgacaaattagatggctcatgtggttatttaaagccttctctctaggraactttcaactaccatatattcaagatcttgcagttgatagttttaaactggaatctcagggactcgggckgactgtcacctatacaagctactcagggatacagcagccatgaacggtggtgtgaaaagtggccatcatcatgtattttcaaacttttttgagatataatacatacaccaaaaagtatccatatcataaatgtacatctcaacacattagcccaaagtggacacagctgtgaaacctccaccagggcgagcagcggaacgtgaccaactcggagtgtccggcgtgcccctccatagccacagctgcctctgggccttaaagataagctctaccctgactcctacctccgcagattggttatgcctgtttttgcttcacataagtgacatcacacagaatgtattctttcgtgtcttgattcttccacttgacgctgtgttcatgagatccatcaacctgtgcctctgtgaaccttctcttacacctctcagcgcacgtgtgtatgtttctgttgggttgtgtaccaggtcacaggagacacataggtccactccagaggggacactgattttccaacgtgttgagccattttatactcctaccagcaggcgaggagctttctggctgcttcttgtccacatcaacagctggtgttgacactttgtccaccctggagggtggtggtagttcctcacagtggctttaatctgtagttcactaatgaccagtgaggttgagcatctttacatgttcttgttttccacatgcacatcctttctggtgaagaagccacaagttttctttattatttatttgtagaagttatttatatattctagacccaaactcttggcaagctatatgtgttgcaaataccttctctcaccctgtgtcttgcatttccataatcacagtggagtcttttgttatacaggagttcttaatttcaatgtgatccaatttatctaccgtttttttctacggttagggtttttttgtttcctgtttagaaaactcaactactccatggtcatgaaggaatgcttctgttatcttctggaaggtttattgtttcaattttcaaatttagaggacaattcaccaggaattgtttttctgtacaatgtgaggtaggggttcagagtcagtccataactgttgtctgtgtttggtgcccagttgacctagcaccatttactgacatgatttcccttctccctgctgctctgctgcagtagctttgttgtgaattcagcatccatataggcatgggttgttgcttttttctgaactattttgttaggtgctgaggactggccttgaactgctgtttcctgtcctaattactgaagctttctcatgagtcttcttttgacaccgtagaatcaccttgcagtttttctgtttttcaaaattttcttggttatacttggtattttgcatttccatttaaatctttgaattggcttataaatttcctcaaaatattctgctagaatttttattagaatttcattraagctatagatcaatttggcgagaacggatattctcacaatattgagtgctccagttcacgtttagccctacattgatttaaatattctccagttgctctcattatcttctagtcttctgtgtagatattacatacatagtccattagatttattygcagacatttggtgcattggatgatcatttaaaatgttccctatttttattttctgaccactggtttctggtttatttagaatgcagttgatctttgtgtattgaccttgtaccagcagtctttccagattcacttaataatttcaatagttatctgtagattctattgggtttcttatatacgtatcattttgtttgtgaataatgactttttcattttttcctttctgaycattttatcctttattgctttcttcttggcttacctcaccagcygctgctgaaaagaagtgttagtggtgagcatccttatttttttcctgacctcaggggggacgctttcaatatttcactaataagtgtgagatctgtggtaggatttttaaatatagatgcccccgatgagatcaaggaagctcacttctatctccactttgctaagagtttcttttcctgaatgcatgctgagttttatcacattctttcttctgcatttattgagatgatagtatgatttttctgcttcattacattaatatgatgaattaagttgattaaagtttaaatgttataccaaccttgcatttctggaaaaagcccaacttggaaaaagcccgggagataccccaggatccttctagcaaatccccctctctgcttgcccacccccttgcttcaaggacaaggagtggaagaaacaaggaaaatggtgaagaagcccagacctcagggctccacctggccctgctgaggcctaaggcatgggggggggggtacttttgtggcttgacttgggggtagtgggggtctcctgtggcctgggtggttgggagtctgtggcctgggtacggggcattgctgactgctgtgacctggcccccctccccaactgcgtcctggccatggggggctgctgtggcctggccctgcctagcagatgagaggcttcgggcctcattttctattgagtgcatggaagcagctctggttgatgtaagaccaggtcacttactggacattggtcccttccttgggcttcagtctcatcagagaagttatctgtaaagtcatgagtcaacaaaatatgcctcaagcaaaccgtgtaaaaagaaagtataaactaagcattaaatattccatcagccacagaaatgtgaggcactgttcccgcctgcactgaggttcagaggctcgcccctccccagcaccctccaccgtgcggtgcagtgctcagtgtttgccagcagcctagggtcttcgaggagaaaagtctctgccgtcctgtgcgggccaccgtggagattggtgatggagctattcatcagttcttcggccagtctcttttcaggggcaagggtctcccgccggtcatcaacgcctcaggggacggaggggagggagagcacatctggaggggtgcaaccccagatggccccacgagaaccaggagggaccctggtggccgcaggagttcaggcccaggaacaggtcccaggctccctcttgtcctggctccttcccggacctcctgggaacacagcacacattccagagagatgagagcagtcatagtctatgcgggtttgcttgaatggcatacaagtataagcccacctatttttgttttctagaattccacttctatttttggtggaatatgaaagtttgactatttcccaaagtggaaaaacacatstttttccttgactgtctggtaatgtctttgttgctcattaaataagtgcatgcagtctccatgggcgcttggtgaacccccttcccgatcccctgagcatgagctggttgtgtgcaccatacccagagcctttctcaagccctcctgcgttttatttattaaagcttcagcacttcacacatatcgcagtgggtagatctgaataagggcatcagatatgcccaccactctgcagctaaggactccagggaagcctctccatgaggattccagtgcttaggccccaggccccgcccctcatgtatctgtaaaacacaacagaaggagggggagggagaggaagaagaagggtgggagggtaggaggaaggggaggggcacttccaccccttccactgcctgaaggatgtgtgcggtggacactggggtgactatggaaggggcgcgctcacctgagctcactcccaccagcatattagcctccgttacaacaactaattctttcggtattttgtgacggggtttcactccgttgcccaggctggagtgcagtggcacaaccatggctcactggggactccacctccccactcaagcaatcctcccaccccagcctctgcagtagcttgagaccacaggtgtgcaacaccacacccagctaattttttcatttttactttttgtagagacagggtctccctrtgttgcccaggctggtgtcaaactcctgggtttaagtgatcttcccaccttggcctcccaaggtattgggattacaggtgtgagccactgcaccagggcttagtgggtctatttcttgactctttattctgttccattgatctatttgttttgcttcccacagacaccacattgtcttgcatcctatagcttaaggaaaagaagctggtgtcattcctgtaggctgtgtgcaggattgtttgcccccttccaagttctttgcctttccattaaacttttaggatcagctggtcaatttctacaacaaagcctgctggaatttctattagaataatattgatatttcaggaagkatggacagcttcctagtactgaatcctccaatccatgatcatggtatacctctctgtcttggtccattctggtagctataacaaagcatctttgactggatggcttataaacaacagaaatctatttcttgcmgttctggaggttggaaagtccaaggtcaaggtgtctggtgaaggctcaggctccccagcctctggctgcagaacttataccctttgcctgttgttctcaggcctttggtttgactgagggttttatcatcrgtttccctggttcgggggcttttggacttggactgagcaacactgccagcatccctggctctccagcttgtggacagcttgtagtgggactcctcagcctccacaattgatggtgccttcttgctatggcctcatgtaacagaaggaactagatagttctctgcagtgtctttttttttttcctttgagatggagtcttgctctgttacccgggctggagtgcagtggtgcgatctcggctcactgcaacctctgcctccaaggttcaagcgattctcttgcctcagcctcccaagtagctgggattacaggtgcccaccaacacgcccagctaattttttgtatttttagtagagacggggtttcactatgttggccaggctggtctcaaactcctgacctcgtgatctgcccgcctcggcctcccaaagtgctgggattacagatgtgagccactgtgcccagcctacagtgtcttttataaggaaattaatcccatcatgaggactccacccttatgaccacaccacctcccaaaaggcctcacctccaaaaaccatcaccttgggagtcagaacttcaacatatgagttttagggggacagaaacatttagaccataacactcacaatttgtttaggttgtctttaatttctcccagctgtgttttgcagttttcagggtaaaggtcctgcacatctgtgttaggtttctccagagaaacggaaccaataggatgggtggatagatgggtagatggagagagggagagacagagagacagacaggcagacaggtagatagacagttgagaggggatttattaggggaattgattcacatgactgtggggcctgaggagtcccactacaggccatctgcaagctagagaccctagggtgctgggagtgtggctcggtccaagtctaaaagccccagagccaggcaacctgatggtagaagtctcagttcaaggtcaaaggcctgggaacccagaggcaggggatgaaagccctggcaccaaaggctagggaggctggccttgttgtccaagggcaggagaggatgagtgtgtcccagctccagcagggagctccatacattcaccttttctctgtctctgttctctccagggccccaacaactggatggtgctgtccacactgagggcgaatctcacccactagtccactcagactcacactaatctcctctggaaacacctcacagacacaccccaaaataacgctttatcaagtttctaggtatttcttaatccagtcaagttgacacctaaaatgaaccatcacaaaaactttccgttaaattcattcctaaatattgtgttttttattgctagtctgagtggtattttaaattttaattttccagttgtttcttgctaatgtataggaaagcaatggatctggtaattgattgtataccctttggccttgctgtattcacttactaattctastgcttttttgtagcttctttgggattttctgcatctacatttataatcatattggttatgaatctacacagatttgctttttcctcttcaatctgtatgtcatttgtttcttcttcttgccttattgcattggctgggatctgtgatacagttttatagagagcayttgctgtgcccacatggcagagtacatagaagggtgacaccaggaggtaagytcagaggtcccaaaaactaagcatagtacagtcatcccctcttatctgtggggaatatgtttcaagacacctacttggtgcctgaagctgcagacagacagatagatagatggatagattatagacagacagacagacagacagacagacagacagacagayagataaagaggggatttattaggggaattggttcacatgattgtggggcctgagaagtcccacacaggccatctgcaagctagagacactagggtgctggtagtgtggctcagtataagtccaaaagccccaaaccagggaagccaatggtagaactctctctccaaggtcaaagaccttgggaacccagaggcagggggagaaacccaggttgtacagaacactatatgtaccatgtctcttttatctgactgccaagagggctgctaagtgactaacagcgggtagcgtagacagcgtgaatatgctgaacaaagggacaattcacatcctgtgcaggacagagcaggacggtgcaagatttccgtgtgctcctcacagggtgtgcaatttaaaacatgtgaatggtttatttctggacccttccggtttataattttaaaatgcaattgactgtgggtagttgaaatcacagacagtgaaactgaggatggtggaggctactgtacatgattttcaggtcctgccgacttctctagtttcattaaagagcaaactctggcaggatatgtcatatttgtataatacttgagagctgggctggctacataatttgcagggtgcactgaaaaatgaaaatgagactgcttcttcatgaaacatgaaaaacgttctttccttttttccaaagtctgtctctgtttgtgctcctccctccatcgccctcccctgccctctcaatctgtcacagtgatttttacgtgccatttactgccgtgctcccttgagcatgggaatacctgcaagacaaggaggggccttcacaggcagaggcgtcagggtcagaaccgtggagtggcctcgggtgagtcaaggctgcgagccccattactccattgccccacagggcttctctttcaaagcacacattcaataataaaattgttaaaatatcaagataacaactacagagcactcaaaatgcaaacaccgtcctcccgagcatggaaccctcttgagaacaagtcctcctgagcactgagtcctcctgagcactgagycctccwgagcagagagtcctccwgagcagagagycctcctgagcatggggtcctcctgggggtctcctgagtggctcccaatcatacacctgcctcgcacacaccagtgccaagggcctgcgtgcttggtgccctgccaggtgtctggggcccggctgctatctcgcactcacagcctcacattcacttttgatgggccaggcgtttagcaggtgaaactgcggctctgagagctcagagagcttctttcacagtagcagctgctcccacaaggggtggattcttccctctgtaagagggcagcggagattgtaaattctaacagtggtggggtggtgagcagtctttgctttagtaatggacacatgtattctgtattcactttcatggtcagatgttttcttaagctaatcttaaactgattaagaatggtaaggtgtggccaggggtggtggctcacacctgtaattccagcactttgggagaccgaggtgggtagatcacgaggtcaggagattgagaccatcctggctaacacagtgaaatgctgtctccactaaaaatacaaaaaaaaaaaaaaattagcctggcgtggtggcgggcgcctgtagtcccagctactcgggaggctgaggcagaagaatggcgtgaacccaggaggtggagcttgcagtgagccaagatcgcgycactgcactccagcctgggcaacagagcgagactccatctcaaaaaaaagaatggtaaggtgtgggtcacaccctagggagagacagtgggcccggtggctgggacagcagctgggacaagccattcaatcacccagggtggcagattcgtcacagacgtgagaggtgctgtggtcaggcaagacttctgcttggccaggtcagggaggacttcctgaaggagacgacattcttacaggaccagtagtcattccccaggtccagaagaggcctgggggagagcctgtgcccagcgggcaggaaagtgatgtggaccccagccaggagagcccagggagccagtgcctgtcactcgggtgcctcagggcttcctggaagggagggcctggcatggcaggggccaggggccagtgagggcaggggagggactggggaggagagcagaggaagacaggtgcagccagatgggagggtcctgaatgccacttctgattctgcctccctcccaccacttaccaacctgcaaaatcctccatgatcttttctttccttttttttttgagacaggatctcactctgttgcccaggctggtgtacagtggcgccatttcggctcactgcaacctccgcctcccaggttcgagtgactctcccacctcagcctcctgagtagctgggactacaggttcgcaccaccacgcctggctaatttttggatttttttggtagagacggggtttcaccatgttggccaggctggtctcaaactcctgatctcaagtgatccgcccatcttggcttcccaaagtgctgagattacaagtgtgagccaccgcacccggccaagcttctgtgttctaatcaaccctgattaaaagctcactcccttgtccccctcctcactagccgccactgccccagcacccctccccattccatgtccccatcccccacacccttccccctccctgcctcccactcccccacacctctccccttccctgcccctcactctccacaccatccctccaactccctccctccacttcccccacactcccccctctccctatccccactcctccacacccctccccactctgcccccactgcccacacacctcccctccctgcccccactcccctccccactctgcgaccccctcctccacacccctccccctccctgagccccactccccccaccaccctccttcctccacgccactgccccacacccctccccctccctgcccctcatggccatcttcctgaagggcagcaccctctagactttctggaacttcgctttgtccacctgcctgtgtgtccaaaaacctctcagaccggtggacacccccagctcatccaaccccctcctgtatgtggatgctcagattgtcgctcgtgttttgcaattacaaacagtgctgcagaggaaggatgtcaaccacgggcgtcttcgttttggaaattggagacatcttcccagggtcaaaggtaagtgtgcatgtcattttgttccgtgttgccaacgcccctctgggagagctgtacccagtggcatccccgccagggactgggacctgcttcccacagcccagcggacggatgcgcggtctcgtggatgagaggtagtgcctggccttggttgaagtttgcgttctctaaggatgagtgagtagacaggtttcaagtgtttaaggctcattttaatcttttgggggaactgtctctttatgtcctttttctgtttgtctctctgatttatggtcctttgtcctcaatttgtacgagttcttcatttattaaggatgttgaggctgggcacagtggctcatgcctgtaatcccagcactttgggaggccgaggtgggtggattgcttgaggtcaggagttcgagaccagcctgaccaacatggtgaaactccgtctctactaaaaatacaaaaaaattagccggacgtggtggcgcacgcctgtaatcctgtaatcccagctactcaggaggctgaggcaggagaatcacttgaacctgggaggcagaggttgtagtgagccgagattgcgccactgcactccagtttatgtgatggagcgagactttgtctcaaaaaaaaaaaaagaaagaaaagaaaaaaggacattggtccttcatctgtggcttatgttgcaaatattttctcctagtttttcagttgtctttgtggtgttttcttttggctgtgcaatatatttttccttttttatgcccatatttaccaatcttttcttttctttgagtcatggttagagagtctatccctgcacccagatgacagaagaatgcactcatgtcctcttccaggacttgtctgagctcccgtttcacatgtgggttcccaagccactggaagtgtatttttgtgtgtggcgtgaggcagacctctcatcttttctccaagcctatccggcgtgccccytaccctgttattcagagtccacttgtgctccagaggtttgaggcaccccctttatctcatgctgacctcccaggtgcacgggcctccttctgggcttcctgtccaccctgtgtctgtctgtccggcacgacccgctggaggacgccgtactgtcagcagggctgaggctgtcaggaaaggggtacaggcggcggaactaggctttctttttcaggggttcctggctatccttgagggataagtgtttcttgggataagattcatttatgtgaagtttagcagtccttcagttttactccatttctttttcttctgttaaattcaaggaaaatcctaaactttgcatctcctcaacgatcagcttgcgtgttctgtccatgtcttgcacagggcccagactcacccaacatgaatgaggggcgtttctgggcaaggagtctggcagtgacattcgtggtttgttgttgctttcttttttgtaactttgggtattgtttgcctcttgacagtatgcatgcattcttcctgtgaggaaaccaagtcattattccagagcggaatttttccaggaaggagccaagygctcagatggctctggctaggggaggggatgaagtaaatcgcagtctgcaaattagagctcagtgcattaatatttcctaaaaatatctctcatttgcatctcctacgagcaaatgttttgcggaaaaaccgtctttatttcgggatctctggagtggcggcggcgtcactccgccgccggcgagtggcctacatcttctccttctgttccakctcattctctccttccacgaatacaagacgctggaaggtgcaggaagagagaggaatggtgacaaacggagcagtctctgtcccacgtgtcagctttggggttttgtctccctttttatcataaagagatgtttttgtgtgtttctttctcatggctaatttgagattctggttatttaaggagcccagagatggaagccagatgactcaactccggattggggagggatttccttaaaagacctctcagtttgtgggagcacagaccaacatgaccgtgtaccatacatgctcatcacgcctggctaccctgatgttctcagactcccagccgctctgcagaaagtggaggctaaacaaaatcatcttccctcccaccgtggctcttgttcaataaaaccaacagaagccacaggctgacagcatctggttaagggagggagggacctgaacggctgcggcgtggtgaccgctgcacccgtaacacgggttgctggctgcgcctgcggagcgtggcagtgtctggccccgtccttgcgcttgtaacctgaagtcaggcctctatgctctgggactcttcttttttttttttttttatcattatactttaagttctagggtacatgtgcacaacgtgcaggttagttacatatgtatacatgtgccatgctggtgcgctgcacccattaactcgtcatttagcactaggtatatctcctaatgctatccctcctccctccccccaccccacaacagtccccggtgtgtgatgttccccttcctgtgtccatgtgttctcattgttcaattcccacctatgagtgagaacatgyggtgctctgggactcttcttaagatgagctcttcaactctgcggcagctgccttttctggcgctgcgggccccgccacactggccggtccctccacatcacgcctcctcctggatctttgagaggctccggacgcccatgacagtcacctgctgtggttgggaggggcattctcaggagcagtcctgagagttcctgagagttccgggtgggcctgaaggcgcgggggctcagagctgcgctttccttgccggcgtggtccttccgtgcactccccggcgccagctgactgcgtgggtgtggaagggaggcctgtggtggcctttggaggctggtgcttccctgccggactacctagcaagtctgttcttggaattgtccatcccgaagcctcctgcgtggactgcaccctcagcagaacccgcaggctgcggcgtggcgcccgggctcacagtgccccgctgtgtgctccagctctcccctggccacattacatgaagtgggaaggtgggctccagttctcccctggccacattacatgaagtctcagaccctcccgcagggccaccctgagctccgacacgccagggccgagttccacgctgctgccaagcactcagcctgcgggcgctgtgtcagccggtgtgtcgaggaggctcacacggcttcatttctgagagtgtgttatgttctactcataaaaggcaacgcagtgggggcaaaatcctggggccatggctgtttccctcccagcgggagtggggccctgtgttccagaaggtcgttttcttaggagctcaaggtcggcctatgaatggacttcctaggcttcccctccctgctccgccgcctttgacactccagatggtcggctggggcagctcagggcgccccgtccgtctcctgtggctcgggcagagctgtccctcgttgtctgatgctggtatcttgacacctcttgtttcatgtggtttttctcttttgatttgtttggtttttcaagcagaaggtaaacatggttcctgttactccaccttggctggaagcaagtctcctgttcagattgtcttagttccttattctctactgtgaacaatctcctcagacccagagagttccaaaaaccgaggatacaggctctccttggcctccccatgtccccatggatactagggtaatgtccttctctgccttagagcagagcatggcctgacgggctcagtataggacctgacatctcctggactgaggctggcttccagcttagatgaccgcccactaaatggcccctggggcagcccgtcgcaaattctcatccaaatagctctgaagacagagggaaaaaaggtgaaaattcattccaacaggaggagatctggctggcaacgtctgggggcaagtgtagcacaaaggagtgctagttgactaagtgggtgaatgtgctgagtccgaagggtgagctctctccagcatgatttccacctcctaggtgtggcattcagtactgtttacaagctgggcagaaacaagccctgcaaggccctgccccaacccctgctcccacccagctccctgacccctgttcccacccagctctctagtggctgctgctctccgcgctcccatgcactgcccagtgtacctgcccagcccatcaccctctcctccctgtacccagcccaggccaccttattttcttggggccgtctgcctctctgacttgagccacagagctgccatcctaggagtctgtggtaaggagaccaggcatgtgccaccaggtggaaatgtcacagcctgacccagaggctggccccagagtttcacttggtgtccgtcagctgcaggctgatcccctggagcctctttcactgaccacatggctccgacctggccagggcagactgtggaagggaggccagagcgctaagcatctgaaaattcagcctggggaggaccctgtctgtgtggtcaccagcccaacctcatgccccttctcagcacctccctcaggccccagggtgcccgctggccagttttcagtgcagaaactccttagagagtggggggcatttcttaggaaatgcctactccaaacatttggattgtgggcttatctgtttagaaattctgaataggttatagttggctcaaacatcaaaaagtataaagaaacatacagtgtccagtgtccctcccccaagctcctcctgcctggttactttctcatgtaaacctatgtgcaaaactgcagctgtgagcaatcttctgtttttggaaagtggtagcaagttgatacccactgatcctcaccttgaatttttcagcgcacagcgtgttcaygcagatagaaccagcaaaacgtgatgctagactggcgtgggggcatgggagaaaggcccagagatggtccaaggaccygcctgtgtgatggccagcaggtctgtcctgtcctctgatgagcttgggagggagagcggatgtctgtttctgactacgttgggggtgcctgttagccagcgaggtggaggagtcctgtaggtggctcggtgttgtgatggttactttcatgtrtcacctggacagggccagagggtgcctagatatttggtcaaacatcactttgggtatttccgtgagggtgtttttggaagagattagcattcaaattggcagactgaggaaagcaagatgaccctccccgttgtggtgggccacatccagttgaggacctgaattcaattgagggtcccctgaggaccctgatgaaagcagaactcattcctgccagctctgtgtgagtggagctcatgtttatttttaagagacagggtctcgctctgtcaccgaggctggagtgcaatggtgccatcatggttcactgcagcctccaacttctgggctcaagcgatcctcccacctcagcctcctgaccagctaggactacagacatatgctaccacgcccagctatttttttttttttagagatgggatctcactatgttgcccaggctggtctcaaactcccaggctcaagtgatcctcccgcctcagcctcccaaagtgctgggattacagacgtgagccactgtgcccggtgcaacctaatggcttttaaagatgcctgtgcttacctcagccaagggccacggttgcactggagttcctggacacagccctatctggttacatggcggctgcttcaggctccggtctgttcctgtgctggctgcagggccaagctggcgtctgaaggacatttcttcatcgaatgggcagtctctggagggtccaattttccttctaggttttcctttcttaggacactgtccttgccaaccatttcctgccacggctgrtggtggccaagtcctcagggcctctctgaatgcccggctcctgttccactcacaatccccggtgcaggcctygcctgggagcagcggcttctcagaacataaaccccagggacgctctcaggtgccagctgtgtctagtgtggcctgtttggaccccatgacttggaaaattttaagaagcacttataaactattaacctgtgattgtaggtaatgaaacaaccagagggctttataaaattaagatcaaattctaccacagaagcatttgaatygggctcactgcatgccaggcgctgctgtaagcactctacctgcatgttctcatttgatcctcagcaaccccaggaggctggcacggtcacagctgcactcatgggcgagcaggtctgtgagccaagaggtggtgcccctcccatggccacgcagcggtcgggggccacamtggtggttcmagcctgtccctgctgcaccagcaggcacactcgagccacaggcccactgcccctcacatgcagagggtagctggtctcccccaagtcggcttggcttctgacgatcgctctcgtgctccctccggccctaccgtgggggcttcatctcacacaatgtccagagtaaggacccaatgtttacagagatgcgtgtggaaagcatgtcacagtcagagtcccaggtaccctcacgtcattcctgagggtacaggaaggaatcagaacaagragaaaaaccaacagaaacaaaacagtaacaacaagcaagctacaaaccaaaggcatatgcagcgcacaaagggttaacaccttgactggttcaagagccagagattaacatcacaaataaaactgcaaatttaaaaagataacaagatgccatgtttcattattggattagcaaatactaaaaagaaagctatgcccggggtggggracgctggaggacgtggggccggtcactcactcccgcaggatgccctgacgatgcctgtcagaaatcttaaaaatgtgtgcaatgtcttaaaatttatcctgtggagataataagggatacgcccccagatagattcacagcctttttataatagctgagatctggacaacctaaatggccaacactacagtattactcaatgacgtgtttattcaaaccatggcattctacgcagtattaaaatgatccagctcttcacttcctgaccttaagaactgctaatgatataattgttacatgaaaaaaaygtgcacagtgcctcgcgtgtcacggggtcagatgtgcacagcacaacgtgcgtgcgtagtttggtctgtccacgtaggtacaggcatgagtcatcacctgtgtgatggggctacgagtggctttttcttctttttgcttatttttcttgtttatatttttctacaatgaatatgagtaacctatagcaaagtgtaaaacagtgtgagcagtctgtgtgccatttcctcgacctctgcccactgggagctgggtctgcagcctggctcccgccccgtcccctgccgagctctgctgaagagcaaagcagaatgtccctgaggagggggcctcgccagctcctgcactggaggagcctctgagtacatcgaactggagtctgagctggtcacrcaagcccccgctgagcacctgccatgggctgggacatcctggggacggaatgttctggaaccacagcagtaggtcagatgggaactctggcacagacgccccctttccagattcttgyccagatcccaagatggatacaaaacatggcaagtatgagctgaggcttagcaaagccacataaatccatcgctgctgcgaaaacaactcgaatgacatggtgttgggaacaaaaaccatacaagaattccgcgtctgggaagggcctttctaaagtagttctggttacaaaacagaagtgagtatcatgaggtgaacagaaaaggcagaaatgttagtgaaatttcaggatacaggaatgaaaggaagtcctgtaacttactgagtggtttagggaggccaccgttatgacagatagatacgaacatgtgtcacggcccaagtgtaagagaagtgtgttcatttttggtgagagcaggacaagcagggcctgggtggtgaagcggagcttggggacatgggaggtttgggtggggggagtctctccccatgtggcaccaaggggcccaggctgagggagccttcgccatcttccttcacaggtgaatttgaggtcaccggggctgctccctggcccagscggggagaggctgtgagcctctctggaagcagggggagcattcctcctgctcacggtccactggctggagcccagccagggcccacccagctgcagcagagcctggatggatcaaggcgtgcccaggaacaagagaagggacacgtgtcgaaagcagagagcagcatcgacctgtgttcatagttaacagttgactattttgacacttgagaatgtttcctagaataaaaatgagtaagaaaaggttgaatttggcaaagacataaggcatacattcacgagaggtgctctcctatggacacagcaggtcactttaactgccttagaaatctggaaacaaggaaattctgagacccacaaatctggcatttatcaaccatcttttctttcaatgacaaatgtaggtagtataattattttatgagcatacagagaaacataactttagactcacaaatgactgaaaagtattgatctacgtggttcttttcaaccaaaattaatgtaaataatgtaaaaaaaaaaagttgaattaaagatttattttccaaagagawcttttgtagccgacatggtgtatctttgaatggcttttaatttttttaaacaaaatttcctctttttcttccaatgtgttttttctattttttaaatgttttgatcctcgtacaacttgctctgaccatgcttatttttctaagttcttgtgaaatcaaatgctgtgttttcattttgtgcccaaacaatgcgaacattaccttgaccaagaagtctgcagactaatgttcaccagatgggctggtgtctggcattctctgcagaacgtgtccaaatcctgcccagttggtcatgatacttcctagaaacggactggatgggggcgaggtaggggaaccatctgcctcatggtccttaacatctagaactggagaggattcgaaggaagaagaaagcatccccctcatctgagttgctttgaaggacattagatgcgaaatcctaatcagaaggtggtaaatttagcttgcaagcatgataattactttattagttgataatacttttcacccaatatatgtttagtatggaaaaccccaaataagtttttaaactgcggctattgaatatggaaattcccttgcaaatgacttctcagcaaatgaatatatggtctagagatgggatattttagggggttactttctttagatagtggagtgcctggagaccacaaccagatctgagaacatcgcatcttggttttcgtgtagcagacagccagtttctcagacttaggacttaaaaaatgttgaaatgtattccacagaaaaatcttaagttgaccactcaacctcacattggcctaagaaacatttttaacgaagacataaaagcaactctaaaattctattttactgagctcttctgataatatgattatgcaatcactaaatggaagtggctttttgctatggtttctggctaccctgtcttaccactgtagcttttggatacaaaattaaaaagaccagcctggaagggatgatgtctatactggcaatatttcttactgtcatcacgttttgtgtaaaacaaatacctactattttgagaacaactttggatatgtttattttggttacaaaatttaaacgatcgttttctgagtttgatgctgttttattctcctatttactgagccccatcgtgagcggagctgggggagtgatatgggaacccagcctccgccgctcctcagtcaccctcacccttcttagttcttacctgtcactgtgaagttaacttgcttcaccaattttaaataatatctcttagccctggctgtaaagatgaggaagtcagcacccttttcctccccacctactttctttccttttgagatggagttttgccctcgttccccaggctggagcgcagtagcacggtctcagctcactgcaacctctgcctcctgggttcaagcgattctcctgcctcagcctcctgagtagctgggattacaggtgcccaccaccacgcccagctaatttttgtactttttaatagagctgtggtttcgccacgttggccaggctggtcttgaactcctgacctcaggtaatctgctcgcctcagcctcccaaagtgctgggattacaggcgtgagccaccgcacccagcttctccccacctactttctgcctttcactccaaaccgtggttagctttatgatttctctatgctcagaaatttatcactttacattcttataaattcttccagacacatttattctagccttagtcctatagttagattcaaaacttactgctagtgcttccaataatgttttaaaattcatttcttagttggctacagtttatcctctatcccataggaataatgtcactgagttttgcatgtctgaaatgtttgtcagttgccttccatgtctgtgacagtttagctggttataatactggtgttcacactgtctttcactaaggatctcctaggatgctccacgaccctctagtaccattgtcattgtaaagaaatctgagccagactggcttttctctttacaactgacatgatattcagtcatgcacatatttaatctcttttgatggtcttcccttttgagcattttctcttcaattgcttttataaagaaaggtctttgttatgaaagatatcaaaatatacgagtacacagaaatacacatgacacttgcatgtatccaccacccagccaccatgcttagtcacattcctccactcttgcatttttttgtttgtttgtttttgagatggagtctcctgtatcacccaggctggagtgcagtggcaggatcttggctcaccacaacctctgcctcccggattcaagtaattctcctgcctcagcctcccgagtagctgggattacaggcacacgtcaccacrcctggctaatttttgtgtttttagtagagaaagggttccaccatgttggccaggctgttcttgaactcctgacctcaggcagcctgcccgcctcagccccccaacatgctgggattacaagtgtgagccaccatgcccaggcactgttgcataatctatgcctttacttactcctcacccctcactcaattattactttgtcttttatgcagatttatatacattgacatgcacaaatcttagctgtacaattytgaaaatagattttttagagcagttttggttttgcagcaaaattgagcagaaggtacagagttcccatgcactccctgaccccacacatgtagccttccccactaccaacaccccctgcagagggggacgtttgttgcaactgatgagcctatgttgacatgtcactatcacccagagggcacagtttacattaaggttcactcttggtgttgtatatttcatacattttgacagatgtgcagtggcatggacccacaattatagtatcacacagaagagtttcacagccctaaagaccctctatgctcttcctgttcatccctccctcccctcagcccctggaaaccactgatctttctattgtttccatcattttgccttttccagaatatcatatagttggaatcacatggtatgaagccttttctgattggcttcttttacttagtaatatgcatttcaggtttttctgtgtcttttcatggtgctagggactgaaagtttgtgtgctcccaaaattcatatgttgaaatcctaacccctgaggtggtagtattaggaggtggggtctttggagaggtgatgagatcatgaggactacgccctcatgcatgaaagcagtgcgcttacaaaagccagcccagagagctgccttgcttctcccactatgtcaggacacagcaagaaggtcctgtctaccaaccaagagttgggccctggacagacaccaaatcttccaggaccttggtcttggacttcccaacctctggaactgtgagaagtagagtttggttgtttataagctatccggtttattttgttttgttatagcagcctgaacagaataagacacatggcttgagagctcatttctttttagtgctgaataatgttccatagtctggatgtgccccagtttacccagtcacccactgaagaatatcttgcttgcttccaagttttggcaactataaataaagctgctataaatgttagtgtcgacatacgtgttcagctcatctgggtaaatgccaaggagtgtgattgctggatcctatggtaagagagtgtttagtttcataagaagctgccaaacggtcttgcaaagtggctgcaccatttccagcagcaatgatgagcgttcctgttgctccacaccctggccagcatttggtggtgttggtggccgtgttttggccattctaataggtgtgtagtggtatctattgttgtttaatttgcatttccctaatgatgtataatggtgagcatctcttcatggcttatttgccatctgtgtgtcttctttgatgaggcatctttcaggtcttttgcctgtttctgtaattgggctgttccttttcttactgcagggctcagagagttctttgtgtattttggataacggtcctttaacagatatctcttttgcagttatttggtcccagtctgtggcttgtcttctcattctctggacagtgtcttcagagagcaaaagtttttaactttaatattctgctgatctatgatttctttcatgggtcagcctttggtgttgtatttttacaaatcaccaccaaatcctgggtgatcttgatttttttcctgtgttaccttataggagttttacagttttcattttacatgtaggtctgtgatccattttgggttaatttttgtgaaggtgcagggtgtgtgtctgcactcgcttttctgcctgtggatgtccaggtgttccagcaccctctgtctttgccccatttttttgcctttgctcctttggcaaacatcgattggctacatatatgcaagtctatttctgggctctctattctgttccattcacccgtttgtctcttcttcccccagtaccacactgtcttgattactgtagctttatagtcagccttgaagccggggagtgtcagtcttcaagttcattcttctcaatcagctgtaccattttgacaaatggacacatgctataactcacaaaccctttcatgacatgggacattattatctccctagaaaggtccctcacgtcactccccagtcaatcctatgcccagaagaaaccactgttctgaatatttcaccttagatgaacgtttcctgtttgaaacatcatataaatggaatcaccccgaatgcactcttgggtgctcggcgtgtctgcaagcagcgtccacaccattgcttgtatcagcggtcagggtcactccaggtttcactgcacgcacacttcaccccatggtctacgcagagccaatatcgtgccacttttggaaaacgtgagaccttggcctgcctataagccaattcacccctctgcctactgcactgtgtgtactgtatcgacacgtgtaaacagcacttcagtgcaatgttatcatttttattttcaaaaggcttgggacgaggaggaaaattgtctgttatgctaacctcccccacctcttggtgttctcactgctcttccatcctcccagaaggcccatctcctgctcggcgtcttctcccttcagcctgcagtttccctagcattttacgtcatgaagctctactgtgaacaaattctgtccattttctttgatctgaaaatagctttatttctggaaggataggcatagaattatgggatggcaggttgtttttattcttgtagtctcttcaagatgttttgcaccatctccgggcctccgttccttgtagctggttattagagtggtggcccagggcaccccgttcttcgggcggccgtcctggtttctgcttgtcttttggttttctgaccattgacggatgtgcttgggtgtagggggttgggtattgatgccgcctgggggccgctggactttgctgaagtccatgttgtccctgctcttggaaacctgcctcccagactcctggccagtccaaagtgttctgttggaggaaacacaaaggtgcccaggtcctggacagaaagcgcagctgagaagccatgcagctgggcccccaggtctcggagggagaagggacgtcctgcccgccccgttcccccaggtctcgaagggagaagggacgtcctgcccgccccgttcccccaggtctcgaagggagaagggacgtcctgcccgccctgttcccccaggtctcagagggagagaggacatcctgcccgccccgctcacatcgggccctggaggaagggggtgtcttcatgcctcttcatccacaggtatttttcagtcgggaatggaaactttcttttcttttttaaaattagggtattagaatcacataaataaaaatatagcctcgtttatggatttcttaaaactaaattttctactttgaaaaatttcaagctcacaggaaagttgagcaaatagtacaatgaacagctgtgtgccctgcacccagattcacccattttaaacacctttgtatattttgctctctgtctataaacacacacacacatgcgctttaggtttttttgccgagccacttaaagtaaggtgcagacatcaggacactccctctcacactctcaacatgcatcccccaagaaagcgatgtcccacagcacagccacagccgccagcccaggcctgatgcttcacacccacccagtgcagccccatcggcatgccccgccctgcagtgcccagcattgcggccgtgtttgtgtgactcgtgcatgccgtgatgtgttacctgtgtgcgctgtggggtttgtgcaagagcctcagacctgcgtttgtggccacctggagcggggccttcccctcctccaggctgcccttgggcagcctcggggagcacccacaggttgtccccactctgtagccctggggggtgggatggggagggccggcagatacctggagccaagcaagcccacccgtttgtctccacacccagagggactgtgctgggactcccaaggccaggaccctgcgctgagggcaatgcggaagcaggcagaactcacatggcttctcctacaccgccttctcacactccaaccttcagccaggctgtagccaccacacacacaccacacacacacaacacacactacagacacaccacacacacaccacacacacaccacacacacacaacacacactacagacacaccacacacacaccacacacacactacacacacattacacacagtacacacacacatctcacacacacaccacacacacaccacacacacaacacacactacacacccccccacacactacacacacattacacactacatacacacatcacacacacaccacacacatacaccacacacattacacacacatcacacacacacaccacacacatacaccacacacacacaacacacactacacacacaccccacacacactacacacacattacacacactacatacacacatcacgcatacacaccacacacacatataaaccacacacatcacacacatacacacatatataaactacacacatcatacacacacatataaaccacacaccccacacatacgtaaatcacacacgtataaaccacacacattacacacatacacacatatataaatcacacacatataaaccacacacgttacacacacaccatacgtccccacagcacacacacacaccacgtacacacccatatgacaaacgcacacacacacccacagacacatgcacaccacacatacatacaacatgccacataaacacacacaagcacaccacacactacacatatgcacacacacacagagatactgtactcccgccttctgacccactagggcctgggtagggcttaggtgagtgtgacagtcccctcaggtacaaaaggcatggaaaaattcaggaatcaagataagtcatattttaacgcaagattttgcagaatctaagtgaatgcaaaacgtccacatcgaacaaaacatcagaatggtggggcaaaggcaggatcagccctctaggcctcctccagcctcaggcccctccgcacaggcaccgcagggctcctccacccccggaggatctggtgtcctcgtgggagtcccttggggctggggcaggggctggccaggcacggtcaggtctcggcagggcagggagcctgggctgcaccggctcccgtcttcttctgtcttctgagtgtttgggaagggagtgtcattccctctgtgcccccaccgcgtccgtcctgggttgtgtaaccctccagaaagggcacggcacacacaccacaaaactttccacacagggagctccggacactggggagcttccacacccgccacagccaagtgatttcccaatcacgaataattctgtcatttttttcttcttcttcccagaaaccctggggggttggtgggggggcgggcactcagagaagaccagaaaatgaaacttttcaacatttgtgtctctgctgtttttgatttctctgagaacaaaataacaaagcccttggagaagcctcgaaagtggcaggcatggagatcactgctgtatgtaaatgtaaaaatgaatgaaagtaactcagtgaaactgcaaaatgtgaatttagacagaaaacctcaggctgcaaatgaacatgtgtagggccttaaagtaacaggagctgccctgggggctgtttccaccttcatcaccacgcagacatccaggaggagagagacccccgtgctggcgcgggacgccagcctcagatgcactttctagacgccccgtgaarcagaagcaagggactcctcagcacccaggcctggccactggtgcccaggtggctcagccggccctcagcctgcctgtgtgccctcacagctcaggcggttcctggaagcgccggcctcccaccccgaggtcagcccgtgtcctgctctccacccctccggcttcagcacgttcacccttttaacatttagccataaaaactcttttttttctcaaacaaaatcttaccccaacatatacatctggtaaaggtggagctgctggggcaggtcccccaagccagcctcccccaccaccttgaagggaccctggggagcctatccccagcagcacatgggccttgggctccttctgcgaaggacagagggctcccaggaggtggcagccctgaagggtcctgatgctgcggggtggaggggagtcatccctgggccctggcctatcaggtgccctcacaggcaccaggtaggggccatgggtccaggacagggggccaggggaactccacacagaaggggacagtgcccagggacaggcgggcctgcagccggagaggtcaacaggtgacctgcccggcaaacagagcagtgagctgaagggaaggatgtgcattgcctggaggggactcagtgccctgctgtcaaccctggtgggcctcaccccacagcagcagcagcagcatggctggcactgaagggtccacagaggacggtggcccccccgccaccctctctcctgcctgtagccatagccccatgcctgtgcctgaccttggcctaagggggccctcaggggcactccaggaactcccagcgggagcaacctccagatgcccccaggagcgtctctgggagcacccctctcaagagaaccccacagagtgtcctcccatcatcccccaagagcatcccccactcatggccttccctgtgcagagcccagcatcrcccagggaccccccaggcccccaggacactgcccccagcacacccagggctacagggctcctgcatgaggtggaccatcctggggcacagaaggtcccttcccagtcaccaaggccccatgaacccttcaggggcacaggcacccctgggggcttcccccagcccctgataacaacggaccctctgcccacccgccagtcctagggctgctccacagcttgccaggtgcccctagatggctggggtgcagggtgcaattgtgttgctgggaagaggctgcctgtgaggcccccacatgggcctggtctcccttttttattttatccttttttaaattaaaaaaatacctgtgattttaaacagtagcaataattttaaaataagcaggtattcattttctttcctttttttccttttggtaaattgtaaatgcttttccctcctcactttggcctctccactatgaataataaaatgttggcatttttacaccactcactcctccttcccctcctcagtctcaggaatttttaaatgtyagcccttattttcagttcctctattaatcagaaatatatttcagatactgttcttttttttctatttttctttttttgagacaaggtcttgttctgttgcccaggctggagtgcagtggtgtaatcacagctcactgcagcctcagcctcctgattcaagcaagcctcctatctcagcctcccaaagaggtgggattacaggcgtgaaccaccgcgccccacccctactctttttctttttttgagacagggtctcactctgtccccgaaactggagtgcagtggcacaatcttggctcaccacaacctctgcctgccaggctcaaggtgttctcctgtctcagcctcccgagtagctggaattacaggcacgtgccaccacatgcagctaatttttgtacttttagtagagacaggggtttcaccatgttggccagggcggtctcgaactcctgacctcaggtgatcctcccgcctccgcctcccaaagtgctgggattactggtgtgagccaccacacccggcccccgaccctattcttaagtcyctgttctcgaatgcaactttatttccacttcatttagttctaccccatttacttttttaaattacaaaattacaaacataagagccaaaatgagattttaaggaataaaagtaatcacaaacactcaaactataaaaataaaagtacagaaaattgaaagcagtcctcatcctgtgtcccatctgcctcagttccacttcccggggtgcccaggtctctctctaaatgagtgctttagacctctatttcttttcttttcttttatttatttatttatttttttttgagacggactcttgttgtgtcacccaggctggagtgcagtggcgcgatctcggctcactgcaagctccgcttcctgggttcacgccattctcctgcctcagcctcccgagtggctgggactacaggctcccgccaccatgcccggctaatttttagtagagacggggtttcaccgtactagcaaggatggtctggatctcctgacctcgtgattcacccgcctcagcctcccaaagtgctgggattacaggcatgagccaccacgcccagcctatttctttttaagaaatgaattttaaagtagataatacctttacacaggttcacaaacaaaaagcttgggggtttccctacccccgccgccagcatctgcatgctgcaggccgtcatagtttcaggattttgtctgtcttcccaggggaactgtgtgcacgcgtctcttccctcttttcttgggtgctggccctgggcatttggcggtttccagccagcctcacaggcacatctggtgggctctgcagcaaagacccttagaaggccacactcgaggtccagggttctgtgttgggggatgtcgatgtcttccatggggcagatgtgtccctgtcattgtctttctccctcttcccattggtcgcttttccttcctgagttccaggagctctttctacatgaggggagccaggctcttgcctgtgagatgaggtgcccaccttagtttgtctcctgaatacagttccaacagcttttgcagaaactgttttatttttctgtagtcaaatttattagcctctcagagcttctgcgtttcacatcactgtttaaaaagactttttctggccaggcatggtggctcacgcctgtaagcccagcactttaggagttagaggtgggagaatcgcttcagcctaggagctcaagaccagcctgggcaagatggtgagaccctcccccaccggcccaccatttctaactttaaatttaaaaattaaaaaaaaaaaaactaaaaagactttcccagctaaagttttaaagaacaytcccattcttagagaacgcctttgagaagttatttttaactattacctacatgaatcactggaatccaccctgctgtacgacaatgaataaagtcaaccaacggttttctccaggtgcccagcccaccactcattccccctggagcacagacggggctccgtgtggatctgggcagcgtctgcaccatttgctctgttgccccaactactgtcttcatccagcctcccgagctgcttcgataaggaggcttcataacatgtttcagatgcacctccttaaaaaacgatcctggccactcctgtgtgtccatttctcctctggcccttcttccctgactcagagccatggccactgcatgtgggtccttgtttgcagcctccccactcttccccctcaatggccccacccttgagaaatacccctatgggaccctctctctctgtgttagtctctccctcctgcccttcctccccaccacctggaggcctgggcaattcccagtttctcggtttctggatgagggagtctgtatatgtgtttctccttcgtactgctggcgggtgctttccaggaagacaaaagggcaatgatgactcgagcagtcctggcccatctgcaattacatccaagccaatttccaaattccagcctgggaaacagggcaagaccctatctcaaaaaaaaattttttttaacccaggaagtgcatgttctgagttcttgcacgtctgaatctgtttcaacttcactgtcagttttgatggactgtttagctgggtrtagaattctcagctctaaatcatcatttttcagaagcttacaggcyccttgcatagacacctaacatcagcaacaccaatgagaagccaaatgccagtgtggttctcatgcctctgtagtagcttgttcttctaacatcagcaacaagaagccaaatgccagtgtgatcctcatgcctctgtggtagcttgttctttctcttgctgggcttttaggattttctctttatgtttgatagtctgacattttagcaggtgtgccaggtacggtgccctgtccttcatcctgtttaggacactttgggtctttcagactgactgcaattcttcaaccctgggaaattttctcttattcttttttttttttaatttttatttatttatttatttttaagagactgggtctgggtctgtcacccaggctggagtgcagtggtgcaatcatagctcactgcaacctcaaactcctgggctcaagctatcctcccacgttggactcccaaagtggtgggactacagacatgagccactgtgcctagacttctactaattattttagtagttcctcactcaagttttctattttatcatcctggaacttttattaggtggtgtctggagtgcctggattaagcctctgtacttcttaagttttctttcatatgcccatgtatttgtctattttctctgcattttaggaaatttcttcctctttatcttccagggtgcccattgaattccaggcttcccattgaatttgaaaatcacatttcaaatctcagactctttcttgctctccagttgctccttttctttggaaaactcccttcttgtgacacaaatctggtatctccatggacctcttcaaaattcagttaactataatttttgaaaattcttccagctctaaagcattaagtatctgggagaacccagtccccattcccaacagtgcctgagaggcaatttagaattgtttagtagaaaaatcatggtttaaattccaactctgccactaaatagcctcaaacaaatcaccccccacccccagataacagttttattccatgaacttccgagggggccacactcatttttaaaaattcaactgcacaagcatgtaccaagggcctctcatgcacctgcctcagggctggctgctgggacatgaagacgctgaactcggaggcccagggctgaggacatcaatcaaaggggtagacgtgtcactgatagacgacagggttgggggagtgtaggacccgcatgccacagctaaggtgttttaagaatgtgcaaaacgtatcagggctgaagggctcaggaggcctcccagggaagagctgccttgggtaccaaggttgcaatgaccggggtgtggcccaacaactccaccgacctcacaagtagtccctgctggccacaggacacaggtaaattctccttcccacagcaagggcagcagcttggggaggcttttccctctgaaatccaggaagatgtcccacggcccctgtctccacgcttccctcccagcatggatgcccacagatcctcctgtagcccaggctcgcccttgaacttcagatgcatgctcagcacccaggggctcttccatggaacagcaaacccctccaggtcacctgcctgtggagggtggggcagggctgctcccacgatgaggatcgtgaccgggagggcccctgaggaccctgtggttgagttgacccctcyatgctctctttcccctttcccaaagctctgctctttggatgtggtcctggggtttccaggggagacatcaaggcggaggaggcctggccctgaggtaagaggagcagggctgcccggcagcctggagcagccactcagacgtccacctcctcggagccactgtgttgctgttggactgttagagacaccttgagccccccracccatatgtcagggctgtctcctgtgggcttggggctcagctgatgccaccccggcctcctgtggctcaggccggagtctggagcccttcctgacccctatctttatcttgcaccacctctaatccccaataagccctcccacctccaccttctgcacaccccagaacgcacgtcctccrcaccgcctgtccctgagccaccctgggccagccaggcacccgccaggacccctgcggcccctccccgmtggtcccttccctgcctcccagctactcaggccctgagagtgagaggatgtgcgaccgtgactcccaccctggcaggayagagcaggacaggacagagcaggavaggacaggacaggacaggacagvgcaggayasagcaggacaggacagagcaggataragcaggacagcttgcatcttccaatgtggagctgtcaccttcrcttttaggcaagagtgttccaggattggccctctcaaaaacccaaataatatcaagtgtcacattcctgaagctaaaaataaacgtgcaacccaacatttcctaagacacaagcgtcttagccaagaacttttgcggctgcaaatcccactgcraagcactgctcagacaagaaaacagacactgctcccgaacagggctgtgcatgccaggctcttggccaccccgatcgctcgtgctaaactttcttcttccccgcaccgagccccgcacacccagggcagtgagtactcagaggcccatggcatcagcagaaccagcatggtgggcrtgaccccgtgtccccgccatgccggccaaggtgccctcacaccctgggaacacsaatgtccctcccagtggccatgggcctcgtgggtgctggagcctgcaggtctcgtggcaacagcccgaaaatgaaacggcaactttggtttctggtggtgaactcgggaatttgaggagaagttgataaatcttcctgggactcaaaatggaaaaatgtaaagtgatgaatgcaaaaggccagccaagagacctggaagccagggccagggccaggttagcggggccactgagggccacgtgggagaggacggacagggaaggacagaagtcaaaaagagaagcagggggcttgtctctaagtgacagagcatctcaaggctccagatcaaaagggcttctgagagcagaaaagttgataatgagagagagaaagacggagggagagagacagagatttttactttaaaggatttaaaataaagaacaaacccgaggagcatggaacgggtgccaggagctttatctgcgaagagcaaagcccagctgctccggcagacagggccggcrgactcgagggacgcctgcagggatctgaggggccacccagggctcctgccccaaactcagaattggccgctgcacagacgagaataagtcactggagacaagcttcggaagccrggggtgcgcgggccggcccctctctgcaagcgagggtccacggccaggagagagggagggaacccgcgtcagctctgccactgacgttcccctcatctgcccctgacgttcccctgcatttattcaaccttctgccctggagaaattctaagttcctataaattcaggccccacttgttttgcaaccactggccttggtgacaaacagtcctgaaagctgccccgggggcagggcgcggyggcrgtgaagcstgttggggggcggccccccaggaggcagggtccatgggctgcggctagcccatcctgaagggcacccctgactctgagcagggccgggaggtgtggctgccatcaccacagggctcccagggactgcccggcacactcaggggcacggggctcaaagaggaatgggcgtggggggccttggggagggcaaagtgccccagacaacccctggagactgggcgggggtgggcggtggggggcccccacacacgagattggtgcccagagccacccccagtctcagtgggggccgtgtctcgggtcttgggctcagacatgggggagacactggccggcttgagccaggcacccgctctgttctctgcctgcaactggcccagaacccacggtgggaaggagctgagacatgggggagacactggccggcttgagccaggcacccgctctgttctctgcctgcaactggcccagaacccacggtgggaaggagctgagacctggtgcaccaggccccaggctcccggacacatggggcccatgtgctacccatgtccatcaccctgggcaccaggcgtcctcctgcactgccttggtttgccaggactcggggtgtggagggacacacagtgacacggtgactgaggctggcgctctgcccaggagacgtggcggaaccccctcggcctggccccacgtgttccaaaggtaggggtccacaccagccatcgcgccgggccgtgcgcacagaagccatgtcctcacccgcccggccccgcccctgcctgcccggcccgtttcccagcagttttgtgtgcctcctttcgagctggagcccgcctccccaagaccagcagcaagggaggctccaggtgtgattggacagcagcacctggcacctcgatgtcctccagagcaatttctgtgcgaggttgcagcagcctttgtgccaggttgtggattttttcacagtctttccgttcttgttatcaggcattcgtgtgtgagaacccccttcgtggccacctccggctccgttgccagggttctagcacaagtgtctccattttggttctgacaactttcactcggggaaaagccagcccccgtctgtcactgcaggggcctggggcaaggacaggcagtgaggcgacgttcccccagagctgtgtgcacagtggccgggttgctccagctcctggcaggagggagcccgtccttggagcatctctcttctgctataaatacgtatttgagttagaaaataaaacgcttccaactgggcggctgacccttctgagctcagagcagccgcgtgggggtccaggcctccccaccccccgcagcctggccgtggcctactttccaagccaaaacgaagttctgatggaaaatgattaacaaaggaaggatttctgcttctctactccggctcctgctgggtggggatggtaattgtgtgccctgtaaactgtgggggagctccgggcaggggccgatgagcccccgccctggctggagctgagggcacgggtgggtcacagggctggagccctgcctgctgggaagggctcaggtgcttctctccctccctctctccgttccttcaggttccacagagaccctggcccccagcctctgaccccgtcctctgaggctgttcggtttgaggtgggagaagcctggtctcatgcaccccaaccttcagagtctcaggcaccaggagccccagattcttgggttcttgcccctggtgctcaagcgagctccttgcatactttagagagtactgaggagcctgtgtgtcgggggcccgggccccagaggtttaggggaactgctgttttcctgtctatcagaagtctggggtcagcccckctttactcggtacgctcagcccccatctggcgtctcagatatgtctgccttatagacaatttcaaataagttgtccaattttaaataaatgagagtgttcgtggcttccttttgcgtctttatggatttcctgtgttttccgccatgagtgtggattgtgttccactgaaggagaaggcggtttcctggcccagcacagtcgcctcccctgggacctccctgcaggccaggctgccccggtgaggtctgcagttccctgggaatggctttgcaccctgagaccctcgcagctgcccctggtctgcagcaccccgccctgcccccccgcccctggaacccaggacttccttctcctctctccaaaccttcacgaacaggaggggcttccaggacacaaagggctttcaggatcagcgcgcctatgctgggcatggtgtggctgcaccagcacccctgtgagacgctcagagacacacggtccctccaggccagaatccgattctgcattttcacaggactcagtgactcacacttgctggagcaggagaagcaatgccctaaaaagtttcggcaattcacacatcaaaactctagagagttgttggaagtgggaaatgaacatttggggagaggctgagatttcagcaagacctcttgggaacttgccctttgtaattctaaagcggctttgctggcttctgaatgtaaacttgaatcgtgtgagttctgatccactcataacattaccgtgctttatgtactaaatgaaagtgcaatttgtttgtacactgattacagttttacccgctgagttggctcttagctcatttaagctgtttcaaatggagcagcagctgccaaacctgcagaaatccaccactgattagctattgccaattgatgaggaagacaaagacccaggaggcccacctgccgtgagggagttcccctgtgagtccaggccggggctctgtggcccctggaacctcggacttcagacgccggcctgggctcccacagcgtctggttttctccatcaaaactgcgcctggaggggtgaggtgaccagatgcagggggtggggcaggcgaggaggcgcctggctaaacccaggttgggaggagcctctgcacagcaaagccggggcttcaggaccctttgctgggacaggtccgggaaccatctgtgattagaggggcccgtttgggagtcgggggccgaggccaaaaggacaccctgaatgccacctttgtccagcaacaaggtctcattagttccatcttctgagctgtcacgccggcaccttccgcctttcccgcgcctcattagccccgaacaaaacccactggtggtgggctcagcggaggcagggaggccacggccagctctgctccactcactcaagagagggaggaggaggccttgaggcagggtcacgctcggtgacaaggggctgcctgtaggcttgtgcttgaaggatgagaactgcatcctccgtcagggaccagacccagcctggtctgaacccagcaggcagcaggcagaagtgctgtgctgattggccgtggacgctggcttaagtcactgacagcggaaatcagcgcagccctggagcgtagctgagcacagctgcagaagagcagggaagctccaggctgcaccctggagaaggccagcagctttctccctccagatcctgggcctggccaccctgtcgctggccaaaggggagcagcgctctctggggcccatggtcagagtccccaggcatggccagctctaggggaaaatggaagatgggaggtctcagaggccactgagccccctgagggagctccaggcttgttgagcttctgttgcgattcggaggcagccagatacagccctgagtgaagccccgcttgcctccagcaccccaggactgtctccacccagcacaggccacagccctgcagaggacccagctcaatggacccctctggagtgggctgaatggtgacccctcaagatgtccacaccgtaaccctggaacctgtcaatgtggcttatttggaaatagggtttttgcagaggtcattatgttaaggatttttttttttttttttgagacggagtttcactcttgttgcccaggctagagtgcagtggcgcgatctcagctcactgcaacctctgcctcccgggttcaagygattctcctgcctcagcctcccgagtagctgggactacaggcacacgccaccatacctggctaatttttgtatttttagtagagatagggctttgccatgttggccaggctggtctcatactcctgacctcaggtgatccgtctgcctcagcctcccacagtgctgggattacaggcaggagccaccacgccagcctgttaaggatcttgggatgagggtgccctagatccaatgacaagtcttatgagagactaagaggcaggaatggggatagtgtggccacaagccaaggagccccaggcacctccagaagccagaagaggcaggcggcccctccacaggaccctgtgacccccagacagacggtccctccgcaggaccctgtgacccccagacagacggtccctctgcaggacgctgtgacccccagacagacggtcactcctcaggacgctgtgacccccagacagacggtccctccgcaggacgctgtgacccccagacagacggtcactccgcaggaygctgtgacccccagacagacggtccctcctcaggaccctgtgacccccagacagacggtccctccgcaggacgctgtgacccccagacagacggtcactccgcaggacgctgtgacccccagacagacggtcactcckcaggacsctgtgacccccagacagacggtccctccgcaggacgctgtgacccccagacagacggtcmctccgcaggacgctgtgacccccagacagacggtccctcctcaggaccctgtgacccccagacagacggtccctccgcaggacgctgtgacccccagacagacggtcactccgcaggacgctgtgacccccagacagacggtcactcctcaggaccctgtgacccccagacggtccctccgcaggacgctgtgacccccagacagacggtccctccgcaggacgctgtgacccccagacagacggtccctcckcaggaccctgtgacccccagayagacggtccctcckcaggacmctgtgacccccagacagacggtcmctcckcaggacgctgtgacccccagacagacggtcactcctcaggaccctatggcccccaggggcttctggggcccagggggagcagggccttgcttgggggttcacattctgcacagaggggatgcaaccggctgcctagggagacagggtcaggacccagagctgagtgtaggctggggagcacccaggagtacagggggctctggcccacccagctcaactcttcccctctcctcagggggcaaggaccctccacaaagatgaggtgaggtgttgacacagtattaggggcacatatcttaatggataggtatcccaggtaagttcctagaatagggatttttttatctacaagcaaatcttaacccctgggcgtttcagcaaaggccctgcctgagcccctctcctcatccacatgccctcctgggtgtggggtacctgtcgttggcggtgctcaggggattccggtgtacatgcctggggaggccccaggtcccgaaagccagggccacactgcctggggatcttgtggcccctgtggactcagggcccatgtgtgcagggaggaggcactctccccacgtgctccattgccagggctgatccctcggcccgagaccctgcttggtggggaggccccagctcagtactcctgcccctgtgtctgtgtgaccctctgtccgtcctgagagtctctgcacatctggtctggtttgactttaacctgaatgcccagcctccctgctgtgtccacagccctttccagaaggacccgctctctcggcacccagcccggagcacctcctcactgcctggtccctgccttgtgacaggacgagttcaccacccctcccccagctgcaggacagacgttagatgcagtggcttggggggtctgctggatgaaacctcacgtttcctccaagagctgcctatttattgtgcaggccccatccatggcaaaacatcctccagtcctctggccactccctccttacaaatgagcttgaggagaaatctgcaaggtcacggcctcctggctccaccatcacagagaccctgcctgggctggacctgtggtggggtcagaggattcttctaccgaaactcgaagaaagccaaggcccggcgtggccgccagatggccaccccgtccccactccctctggaagacgctgtcagctcttccatctctctgagactgtctgaaaggcgttcagtgaaatacaggtgcctcccatgggcacgtctcacgctgtcctctcccctgcaggaatgaccatatccactccagaggccctgatgacctgtgcgctgtcacccagccacagcgcaggccagactccagtgccatgtcccctgcgcaatgtctgtttctttctgcagcaagtgtagccccaacatcctcatggcttaaatgtagagccagtgcctcactgtggcccagcggtccctgtgcccagcagggaaaaccttccagggcgcacgaagcccataacaggagctgtgcggcctcaactcccctcaagacctagagcttggccctcccaaaggcggctgcctggacccagtggagcctgtgcagccggtgtccaggctatgacggcaccttcgggactttggggctgcacagtcaggtttctcctgagtccttgagctaaaaatatccctgctgaaatttataacaaaatccaactgtgctctgcacattttctagaagccctccccgccaatacacagctccgcaaggcaaaaccgctgctccagcatctctcccagtgacgctggggcacaacgtcactcggtgtcctacaacccggccagtgctcatgcacccctcacgttgctccaggtgccatcaacgaacaaggctgtccccagcctcctgaactagcctccgaggggctggaggcctgcgcaggccatggatggtggcagacaatggcggcccagcacagctccccgcagggagagaggacctcaggtcttggcttggccaccagtctgcccactgcctgggcttttccttcagttccgtgtgtttgtctccaggctgagctaatggtcccccgtcccatcctccgtttgttaaggacttgggccatccagaaacgatggattctaactccaacaatacaattatactctggctagtgggatggaagtaaaagtggtctaggcctcactagtaatgtcctaacagggagaaggaggtatacctccttttcatttacctctctacggttggctggaagacaagcatgatggctggcacatgggcggccatcctagactaggagttagcaaccacatattgaggacgactgcacagcaggataagagggtggagcccctgatcccagccctggtgtgttgacattctatctagaaatggacactctatctttttaagcccctttcatttctttttcttgtctttcctgtgaccctttcctaggccttgtacagtgtggactagaatgatgacagtgggcaccctgccttgctcctgatcttaaggggaatgcttctaatggggaaaagagtccctatttaacaaatggtgctgggagaactggctagccatatgcagaaaattgaaactggatcctttccttacaccatatacaaaaattaacttgagatggattaaagacttacatgtaaaacccaaaactataaaaaccctagaagaaaatctaggcgatgccattcaggacataggcacaggcaaagatttcatgatgaaaatgccaaaagcaatggcaacaaaagaaaaaaattgacaaatgggatctaactaaagagcttctgcacaacaaaagacactatcatcagagtgaaaagacaacttacagaaggggagaaaatttttgcaatctatccatctgacaaatgtctaatatccagagtctaaaaggaacttatacaaatttatgagaaaaaacaaaacaatcccattaaaaagtgggcaaaggacatgaagagatgcttctcaaaagaagacatacatgcggggccaacaaacacacacaaaaaaagctcaacatcactgatcattagagaaatcaaaaccacaacgagataccatctgacaccagtcagaatggctattactaaaaagtcaaaaaacaacagatgctgatgaggttgtggagaaataggaacgcttttacactgttggtggggtgtaaattagttcaaccattgtggaagacagtgtggcgattccttgaagacctacaggcagaagcaccaattgacccagcactattcacaatagcaaagacatggaatcaacttgaatgctcatccatgatagactggataaggaaaacgtcatccatatacaccatggaatactatgcagccataaaaaggaaagagatcatgtcctttgcaggcacatggatggagctggaagccattatcctcagcaagctaatgcaggaacagaaaaccaaacaccacatgttctcatttatatgtgggagctgaatgatgagaacacatggacacatcgggggaacaacacacatggggtcctgttggtggcgggatgaggggagagagagcatcaggaagaatagctaacacatgctgggcttaatacctaggtgatggattgataggtgcagtaaaccaccatggcacacatttgcctatgtaacaaacctgtacatcctgcaaatgtacccagaacttaaaataaaagttgaagaaaaaaaaagtaatcaaatgagaattaaaaagggggaatgcttccaagacttcaccactaagatatgacatatgattcagattttattttatttatttatttatttgttgagacggagtcttgctctgttgcccaggctggagtgcagtggtacaatctcggctcactgcaacctctgcctcccaggttcaagcaattctcctgcctcagcctcccaagtagctaggactacaggtgtgcgccaccacgcctggctaatttttttgtatttttagtagagacggggtttctgcatgttggccaggctggtctcaaactcccgacctcaggtgatctgctcaccttggcctgccaaagtgtggggattacaggcatgagccactgcacccagctgtctgttttataccgtatagtcatctcaccttctcttttccttttttctctcctttcttgctttctttgaataaatcacacttccctcattccttcccctgaatgagtgtgaaagttatgtgtcctgcccttcctgtcttcttggtcatttcactgcctactgacccttccagtctaaagtcagtctcccctgctccatgcacgcttgtgtgttgtattttgttttatctttattgtcttagccccattagacagtccatgtgttgtttcatattgtctgctttatagggtttagctgtacatatttgccactttcttttctatgaaccatgtgctcttcacattgtccatgtttttgtttctctgtgttggattagagattatttcttcagattaatcttccatttcactagctttttctttaactatatctaacagcagttaaatctatccattgagggttttttaaagtgttactatgactgaattttttttcaatttcgtctatttttaatccacttagttttcatttcttttattttttatttatgtattttgagacaggttctcgctctgtcacctgggctggagtgcattggtgtcatctcagctcactgccgcctcaacctcctgggctcaagcaatcctcccacctcagcctcctgagtagctgggactacaggtgtgcaccaccgtgccagctaatgtttgtatctttgtagagatggggtttcgccatgttggccaggctggtcttgaactcctggccgtaagtgattctcctacctcagtctcccaaagtgctgggattatagtcgtgagccatcatgcctgacctatttagttttcatttctagaaattctatttggcctttttcaatttggctttatcatatttttatatcacacactctatattcattattttaaatcccttttttacttacttaagcacatctgagttatatcctctgccctggaaatcccacagctgcaggatctgtgagccacgctctgctgcctgtgtgcttccagctcgccatgtgccttgagtcctggtgtgctttgtgagtttccgcgatgggtccacatgtgtgcggcaatgccttgaggtgtgggttgacctggtttctcccacagagaacttgtgtttgctgcaatcctgaccagtctcaaaccaactcacattaaatcctgggctttggacccccaggttgtgtgacttttgggggctgacctcatgagtgccagcttgtggtcacaaatctttagggagagggtttctcctccactccgtgcccaaatcagggatagtgcccaggggtgggggccagagaatgctgttctagcccagcctcttgtggttctttatgtggacagggtctccctccagactgcccttcttcagtccgccctgagctgtgccgtcttccacccgggcctccaggccaagctcaagttcacgtttgtaatccaataaatgccctcgcaggcccagccagcccagagctcccctcagccctccaggttcctgcccacgcgccagctacagcttctgagttcatttctcacctgccagctcactcgtgtgtctgagaaaacactgtgtgtgttttgtgtttcactcagcactttctgcttccagtgggagtgatgggaagggaaccaagttccctgatctgccataaatagaagtcctctgtgtgtgtgtaagacccctggtgctgggagggctccccactgggacctggggtgtggtaggtggaggcaggaaaaggcctctgcccccttacacatggccttctgcccccttacatggggtgcgggggctctggtgaaatcaacgatgccccatcccgaggccccgggagaaacgctctgcacgatggctacatgacataaacgaaaaagcgtcttgtcacggggtgggtgcacagtgtgaggccggcttttctttataaatgtacgaactacaattgtctcttagtgagtgctgtgctggcccttctatcattgtccccacctcacagcgtttgggtggcctggccccagggctctgacaggctccaccggtcgctgcaaggatcccactggacaggacggacactcgcctggccttggcctctctgttcccgcggcaacccagtgctgaggaatgatgaccttgtgtcatcggccaagacaactagatcaaagggcaggccacgtgcaccctgctggggccatggttctctgagcggggactggagtgagcaggggtctcttgcacacctgtcctgctcatgggttagtgatcctggtagggccaccctacctgagagatcggaaaagcacagtctcaacgtgcagtcagatgatcagcacagcaggacacgcgatgataaaaataaaattatttctgcacactcagcgcttactgtttatggagagcttttgccacattagcatccttattcggcccgtcactgttctgtggagaggattctcgtcctgctcactttacaggctccctgccagcctcacttgtggtcccaccagccccagggccgtggcccctccgccaggcgatcccagtggagagagggcctctggcctcttatttaccctgaagtcccagggaggagaatcagacccaagagggcagcatgtccgggctgtcctgggcctagctggccacgtgtccgtccagcccacgttctcagtgccctgtgtgtccgagatcactggacctcagctggtgcagggagttggctgtggctttgtgtttttcggccaccttcctgctactcccaggggagtatggccaggatcacgggggactgggagattcctggactggctggacagtctggggaggggctgtgaggcacagggacacgggttcccgctggcactggcctcccgatgttccctcggcctggccctcttcccccgttgctgatagagccatccctggccctggcccttgccctgcattgagtatcttatacacacctgaatctctttgcacgattatccaattagttccttggggtaaatcatcacagtgaaattgctgagatgcagaaacgcatgtttctgatgacctcagttcatattgcccaaaagacttcccgaagggtcgtgggagggtcaggcgcggacatcctgtgctgctggcctcgccacgcctggctttcttaccacgccactgaaggtcgtcagtctggagggtgaaatacgatctccccttagaatttgtctctcttagattcctaaacatttttcatgtcgttgttggctattcgtgtttctctttttgtggacgttttgcccatcttggtttggtttcttcagaactagatctcaagtccaggatttgagtgtaagtcatctatctgggaggtggtcccaggacccgccggaaagagaaggcaggcagtggctggggtctcactgggcatagaccatgtgccttctggtcactgctccccagtgaccgcccacagctcaggtcaggctctgtggaggctgctggaggggtgggggtggggacataattctgcatgaatcgcatggacttccggccaggacttgcatgaagtgggcttggcagtgtgcagcgtccctgggcttgtcctggctgctaaggagcagcagtgatcagatggcccccatgacaactgaccctgagtgtgcacaggcgggagcagacacctccactggggagcagggcacaggcctgttcctagtgttcaggtcgcacccatgggtctgcagagacagtggctgtggcacaggtacaggtcgaactgattgacctcagttttcccagtgtggggaacccgtgttgccaggcaggtggctgccctgctcacttttgggggaaaacagttctactttcctgtcttccagcccaagagtgggccacgtggctccctttgtcccgatgggaccacacactctcactcacacaggtcaccgctgagtccttgtggagctcgtgagggcggagggccaggccccgtgggttctctgcgtttctccagagtccaggtcccgtaactgtggtttgtgtcatgcgactgtggcagcagaggcagcggcattctgtgtgtggatgggagaacttaaacatgcttccatagacaggggtgccaggcccttctcggagcgccatgcagacacctctggagagggtgctaccatgcggtctcccaggtgaggaaactgagtctggactccgacctccagtgtggctggaaatagcgcccgccaggttagatctcacatggtgagtcctgacaccggggtgtgtgcccaggggatgcgtagtgctggtcttggctgggccgtggctgtcaatgggagggtcatcaggtctttaaccagagaaacccttggcccaacactctaatcgtaaagtcggggtgggtcccttggcctgtccgccccctgcagccggcacatgacagctgacacaggccacggaccaccgccaccacctcaggaccctgcagccagcagtgacgtggcaggaacagtggcatctttcccagatccacctgcccaggcaccggcgcccctccgagccgctccctccagggccccccaggtcggcgggtgcggcccacgctcaggccccaggcctcaggcgcagtgtgggaaccgagccccggggtgcgctgcctacaataatagagcgtgacgaatggcatcgcccgcgcccagcgggacagggcccggctgtgggagccggcgcccggcctcttcccagcgccgccgccagaacgcccggagccttgggcccaaagaatgtctgggaacgcgcgacagcggccgggggcggcgggcgcggggcagccgcgcagacaaccagcgggcgggggtcctgcccgggcctgggacagacgcgccccagggtcgcctgcagggagcgcgtgccgcgacctccaggaccccgcgcgggaggacccggcccctccccgcccctccgggcccccgccccgccccctcccttcacggtccgggctcgctcgcccacgggtgggggtggggcggggaagagtccaagggcggggccggggccggggccggggccctgcgggtggggctggtccggcttggcttttcctttcgttgttgttatttttaccaaagcaacatttgcacccagcgtgggcatcacagagcaccaaggccaacccagggcttcccgcgcaggcccggacgggccctccccccaccccgcccccacccgctccctgtcccagggccccgccccgcctccgtccttcacagcggcgctgcgtgcggcgacatcgcgggttctccgggtctgcgcgtggaccgtgggtctctgcccccgtgggcgccgcctctcaagggcgcgctcgggctcaggtgcggccgccacgcgaagcccctcgcagcgggctcggcggcccggccggtcttacttcccagccatccccccagtaggaagaagcgcgtgtcttcgtttcccgctgccgctcctgctccaggacacccacccccgccgcgaccgcctctggccccggccccctggcctcgcccggcctcgccctcggggggcttccttcgcggcgccctggggcccccgtgccgtcgtccgggcgcttcccggggctgctgggggtcctgccgggtcccgcctggaccaagtgcacgaacggctgagggcgggggtggcctcttcgctgttcctcccaatgaaggccccacgcgagacccaggcccgtggccttcgtggcccgacgcttacccctggcagctgcgtcccaattcccttccttcaaaggctgcatcggtcctgctgtcgtggggcccacatcgtgttcacccatccaccctccctggaggcgccgctgctccggcgtttagccaacgtgaacaacgcggctgtgaacatgggctacaaaggtcttttccagacccgcaattcttctgggtatagacccacaagggggttgctggctcctatggtaattctatttttaattttctgaggaaccgccatactggtttccatagcggctgcaccatcttacactccgccagcagagcgcaagggtttcagtctctccacatcctcacacttgtcattttctgttttgtttttttttttaatagtagccatcctaatgggtgtaacttttccctgcactcccctggtgattacaggtgctgagcatctttacatgtgccaactggccatctccacgtctcccctggagagctgcccactcaagtcctgtccactcaggtcctgtccactcaggtcctgtccactcaagtcctatccactcaagtctcttacagccctgatactttccagcttggctctcccccatggtgggccagaggtcccctcgggggccagcaagctccagtaacagagggtgtctccttccctgcatttcggcagaagccctgggagggctctgatgggtttggctcaggccacgcaaccatccccaaccccatttctgtgactaggagggtgagaggctctgactagcccagcctgactcacccacacctggagctgggagtgggaccagccccaaccaagccaagagttgggggagggtccccaaatagacattaggcagatgaacgacataaggtcaccacagtattcattgctgtgttattcacaatagtgagaatctggaaataaccaaatgtctacaaagcgggctgggctttgtagtgtgtgcacgcagggaacgtggagcatccggtcacaaggatggtgcacagtgatggacaccaacagtggggccccatgtccagatgaaatgtcacgcagtggaataaacaccaacagtcattgtatctgagtggctggaatacgatcgatttgcattgtcctcattttgccaatctgtattttctcaagttcccaaaaggaaacacattccctttataataaaaaggaagtgacactgtggataaacacatcggaggcatcctcgtcagcagcccccactggctgcggtggacggtctggcactgctccaggcctaactggacatcctcccagcaggggacgagggccaggaccagcagaccacccctgggtcatcctgtctctgctgttgtccagcccagggcctcacacctgggcatgattcccccagatgtggaccctccctggctgaggacttccatggctggcctcggctccctgactccccgactccccgacagggcccatctgttccttctgagcctgaggaagcttccctgttactgccctgacgtctcaacagggcctggtgtgtgcgatggtgacagctcccacagtgagaagcatgcttgtccgtcaccagaagacacccagccgcacaactcaaggggtgcagtcaccccaaaacctagctggtgcagatgcctgctcaacgccccctccaaggtattggagctcctggctgctcctgcctgctggcgtttagcgatcccttcagaaaagcagagctcagaagccaagtattgatctcatgggatgctttgtttcctaatgagccattcactttaaagcaggctcactgcttacatttaaattttggattcctctggtcaaacatccatcaagtaaatggatagaatgtttaatttgatggaggctgtgctggcatgagcagccgggctgcctccgcctttctcctggaccaaggggacgcttgggggcagaggcttttccaccaggagccaccaaggccggagctgggttgggctggctctcagaggggtgcagccacgtctgctgggcaattccccgaacatctggccccttggcatcatggagggaaacggatggctatttgctgacttctagaaaacagctgagtttatgcagactaccaacaaaaaggcaaagaaaaaaatgtgttttgccttacagctttcaaacaaatgagttacccattgtgctgtgggacacagccccctaaaagttgcacaccccctcatagggatgctgtgttctgcttccagcagcttctacaaggtgaggttcccagcccagtttcacaaagcgtaagtggacccccagcaagtgttcacgaaccaaacacacactttaaagcggcagatccagaaacaggtccacaccaccctggccacgtggctgtggctctaacctctgtctccacgggtgtctctgcctgttttgagtcccatatagacggtcacactatgtgtgtgctgcttcataagaaacttctaggcaatcaccaccgtgagggccgcctcaccctggcctcacggctgcattcacgctggactgaattcagaatccttccccagtgtctaaatcgagttcagagttacttagcaagggcaggctgggccgtggccccacaaacaggactctgagtctggaggccccgtcaggggtcctcagggctcattcagtgagtgtgaggggctcctcaagccttggagatctgcagaggtgggggctgtgggggtgacaaggtgtggattctgctcctgatgccccccgagcacctccacggccccctttcccctgccctgcccctcccctcccctgcttttcctttcctcctgtcttgtggccccatcccggttctacaaccttcctgctaccttcaggatgctccaggtgcaacgaacaggagcctcttctcacactgcccacccctcaaaaccttcactggctcccagaaccttcactgctcccagagctgggcagctcagggcagcaggggcttcaggcatggctgatccagggctgtgggatggttgagatggggggccatttccaccctctgcccacgctgcccctcccatcttggggtggctgtgaccgcaacagggctttgtgctgattggaccaccgtgagccaatccccaaagccaggggttctcccactgtgaccagcttagaccaaccactcacatttgtgaggggtgtcggaagaattgacaaagattgagatgagcaaagatcctggggctctccattcagcacaggaggggcttccagagccccatggtggctgccagtggggagtcccagcctggcgcagctgcctgtgcgtctggcctcagccttttccgtacattgaaataagaatagttaataaatgcaaagtccttataatgctagctggcgcacggcactatgggagcctcgctgtcacactaggtcctgtctgcctccgtgctggaaacttcctgggcctcttgttgcactcagagttcaaccctaacccctctcaaggcccaggggcctggcacactgtttcctgcctccctgcccctcgccgcacctctctcggctcccctggcccgggctgaacctgccagcttcgcacctgctgccccttctgtctccgcccagggccccgagtggctcctcccccaaccaggccctgctcggcgggggcggcccctcttgtctctctcccctctgccacttggtttctctctgcccacagtgtgtgtgtgtattggcttcctgctgtcttccccctgggaacaggagttcagatcccctgagacaggaatcatacagggtggttgcaagaggatagaaaattccaggcagcagttttccaggaccagccaaagggaactgttgaaatagatttcaggctgtaagaccctgaaaaccagagtgcgggcccagctggctaagaccaactggacccaccccggtgctggatttgacccgggtttcacctaggacctcatgatacgctcattaacatcctaaatcccaggccaggtgtggtggctcacgcctgtaatcccagcactttgggaggccgaggcaggcagatcacctgacgtcacgagttcaagaccagcctggccaacgtggtgaaacgctgtctctacaaaaatacaaaaattagctgggtgtggtggcatatgcctgtaatcccagctactcgggaggctgaggcaggagaattgcttgaacccgtgagacagaggttgctgtgagctgagatcgcaccactgcattccagcctgggtaacagagtgagactctgtctcaaaaaaaaaaaaaaaaaaatcctaaatcccacacccatgggtgccaggacagttctgggaacacccatgtttggagtaaaaactggtgggaccacagttctgagaaatctccacctttttccaggaatcttcttggactctgccccttggtttaaaaaaaaacccataaaggcagcagccccaaacctcactgcgcgactgtcttgtgagtccacgcgaactcccctcttgagtgtagacttttcactttgcaataaatctctgtactttgactattttcggacttgtccttgaattccttctcgcggtggtgtcaagagccctgacactggctgggatcgaggtcccatcagcgtctggggaccttgcacagcccatcagtatcaccctcagatgagccgagggcgtgcaggtcccaggtccgcttggtgccggtggcatgagtggtcggtctgtgaaagccaggggacccacagcagtgccagcccccaaggtagggcctgcttgcccacagctcccccaggtgtgagcccgccctgtagcagcaggctgcccctggtggtactgcagagcccagggtgagttcagctctgtccccagagggccggtgggccttctgctggctgtttgcacagctcgctgggtgcggggcagccttggcctttagccggggcctccctctccctgcagggggagtccccagagtcaccagcctggctgctgtttctgcaacgcccccaccacgccccaccaccatcaaggcccctctgcccctgccttcacctccccaggactggggcctccatctgctttcacctccctgggctcccaggttcagccctccaagagttgctgcagctttactctttctcttcctttcactacagatgcgttcccccctcagttccaggtgtgcgttggggacagagacaagggcattgcccaggctgccatccttaagaagtctacgtgggaaatgggtaacccacaggaacagacttgggtcagtggcaggcatgtcccatccagacacctcttccccagctgctcccttcgggctcaggtgccgcctcctctctgcagcctcctgccaggacctgtctgccggagcttccttcgctcagccctgaaccccgcccaccactccctgcaggcacaaatccctgatttctgtccatctgttccttgcctctgaaatgtcaccattgggtgttaaagggtctggaggtgacctgaggcaggtgagatagggggaccatgagggggccactcctcagccctgtgctctctattctgcccctaagaggagctaaggaacagttctttggtctgattgtgacactgcatcctgtgctttcactgtgtggtgggctgagtgatggccctggaatgtccgggccccaatccctggaaagtgacctcacctggcaggaatgtttgcaggggggactcagtgagaggccctgagacgggggattatctcggatcatccgggtgggactgaggcgcctctggtgttcttagcaggggaggtctgccccaccagaccacgtgtcaccagcgctgtgctgctctgctggccacgagagggaggccaagggggcagcgcgggggctgaggcggcaggagcctcgaggagtcctgcagacaccttacacctttattgtgcccagtgaaaccactttggacctggagctgtgagaacgtccatttctgatgttgcagctgcctgctctgtggcgatttgttgcagctgaagctcgtgcagctcggcagtggcgtggtctgtgtttctcgggttgtgtggcccccattcctgctggaaccggggcagtgagccgaggtgctggaggccctgggcggggcggtgtgtggtcccctcaaggctgcccggctgtgaggaccaatgtctgcaccacctctatcagccggccctcctgcggcagctggggtcgggcggggtgtggggggcgtgaacacaatgggccagaacccaggtgtgggctcgaagcttctgtggggctgctccatgcgggtgctgttcccaaataattatctggtcaaatgtgacgcggtcctgcagacttggcatactgggcagagcctgacaggctcacacactttgagcagaaatccctttttcagaaattgcctctaaggaaacgccacgcgtggggattcagacgtgcaatgaaaggggcttgatgcggctgctcctcaaattttggtggatttggtgggaggcaccaccccaccacaccttctggtgcgttccctgtaggccgctgtccagacagacgacctggccccagggttccaggcagggtcggggctcaccgattgttgctggagaggttggaaggaggggtgagtggggctgcccctcagtgccttggccctgcagctagaggtcacaccctggcttcggcgttggcagtgggtcccacgcgggcctgtgccggcctcgccgtgcgggcacccctctgctgggatgggtctcagcagagatggagaatattgtgctgttgagaacactaaacgtgttagctgtcggtgagactataagtgattcctaccattttcttcatgtatctttgtatttctagatttcctacaataaacatgtattaaattactattctagtgaaagaaataaaagacagtagacttccacttctagacaagatggagtgacaggggctgaatgtacttatctgcccaaaacaactaaataagagacaagactattgaaaccagggtcctcaaggcaatgggcatcagacaaaaaggagccgtgacccgagaaatgggacacggacgcgatgagccctctgagggcccggccgacctcccggagagagtttccaggtcacagtgctgggaggtgacgcaggtggagccagggatctcctgagttgaggacgctgagagtcggggagaccaaggcagccacagcttgcagggcagagggtgagagaggggagctgcacctagcgagaaccctggaaaggcacagagggcccctgagaggcagcagaaggctgatgagcaaattgaatctgtagttaaaaaccttcccctctcacatacaaaataaccccgggcttagacggcttcacaggggagctccagccaacatttaagaaagagctaatagcaattctacataagctcttccagaaagttgaaaagcagggatttttctcaagtccttccaggaggccagcatgatcttgatatgaaaaccaaagacattacaggagaagaatataggaacaagcatccccctttagaagtcctaaacaaaagcttactaaattgaacccaacaacatattaaaaagatgatacatcataaccaaggagaattttccccaatatatcaggattgtcttaaggattgaacacgtaaaaatcaatttaagtcaccatattaacaaactgaaagaagaacaatgtgattgtctcaatagacacagaaaaagcatttgacaaattccaacatgcattctcaaaacactcttggcaaacaggagtagaagcaacttcttcaacctgataaaaggcatctctgaacacccgacagctgacatcacacctacttgtgaaagactgagtgcttcccctgaggccaggaacaagtcagggacagcactctcaatggtcccattcagcattgcacaggaggttctagtcagggcaattaggaaggaaaaaagaaaatgaaaggcatcgttattgggaagaaaagaataatactgtctttatttgcagaagacaagttcatctatgcaaaaaaatctaatggaattcacgaaacaaaaagctgctggagctgaagagtgagcatcacaaggttgcaaggtcaagatcaatgccaagagtcactgcatttccataccccagcaacggacagccagaaattaaaatggaaagaacaacacacttgtcgtaacatcaaaattatgaactagggataaatctgatagaaggtgtgaaagtcttgtacacataaaatgagaaaacattgctgagtaaacgaaagaggacataagaaatgaaaacttacaccatcttcatgggctgagactccatgtgcgtaagacagaagttatccccaaattgatctgcacattcagcaaaatcccaactgaagtctcaaaaggcttttttttcgaagaggatttgacaaactcattctaaaattcacatagaaaggcaaaggccctataacaaccagaacatcgttggaagataagagcaaagttggaggatttacactagctgatttttagactttataaagctgtagtaaccaagacagtgtgtttataaaatgctcagaaatagagccatacacacatggacaattggtttttgacaaaagactctcagtgaagaaaagagggtcttttcaacaagcagtgctaaaacaacggaatagccacatggaagagggaacattgatctataccccagggccatataaaaaatgaactcaaaatggattatagatctaaatgtaaaacctaaaactataaaacttccagaagaaaacatatgagaaaatctttgtaggttaggcagaaatttcttaaattcaacgccaaaataaatgaataaactagaattcatcaaaatgtaaaacttctgctctgcaaaagacatgtttaagagaatgaagagattggcaacaaagcaggagaaaatatttgcaaatgatgaatctgataagactccagcatgccttaaagaactcccaaaattcaataataagaaaactaataacaccattaaaaaatgggcaaaagttttgaatagaaaatccctcaaagaagacatagaaattcagatcaaaacacaaaaaaaagatgatcgacatcattagttaccacggaaattaaaaccaccataaaatgccactgtccacacattaaaatggctaaaatgaaaaagactgacagtatcaagtgttgatgaggatgtggagtgtcatggttgaatgtctgtgtccctccaaaattcgtatactgaagccttagcccccagtggggctgtattggagatgggcctctaaggaagcaattaaggtaaaatgaggtcctagaggtggggccctgatccaataggattagtgtccttatgagaagagacaccagagagtttgctcttttttctctgcatgtgtgcacttgtgaaggccctgtgaggatacagcaaggaggtggctgtcaacaagccaggagagagccctcacggggaatcaaatctagcagcactttggtcagggacttccagcctctagaacggtgggaaaattaacttttgtggtttaacccccaccgcctttctgtggtattttgctagagcagcatgagcagaccaagatatcaaataactgaggatgtggagaaactgacactgctggtgggggcagaaaatggaacagccacttttaatagcagtttgacagtttattaaaaagttaatgatatgtggccaggtgcggtggctcactcctgtaatcccagcactttgggaggccgaggcgggcggatcacaaggtcaggagatcaagaccatcctggctaacatggtgaaaccccatctctaccaaaaatacaaaaaaattagccgggcatggtagcgggtgcctgtagtcccagctactcgggaggctgaggcaggagaatggcatgaacctgggaggcagagcttgcagtgagccgagatcgcgccactgcactccagcctgggcgagagcgagactccgtctcaaaaaaaaaaaaaaaaaaaaagttaatgatatgcctcccacaggatccagacctttgaccctaagttttttgtcaagggaaatgaaagcatatacgtccatacaaagacttgtctacaaatattcacgaatgttcacagcagctttgtttgcagtggccacggactagaaacagcccaaatatccagcaacaggggaaccggtaaacaaactgcagtctctccttacaatggaatcctaataggaatatgccacattgatccacacagcagcacagattgatctcagaataatcattgcagtctctccataccatggaatcctaataggaatatgccacattgatccacacagcagcacagacggatctcagaataatcatgctgagtgacaagagccagaccaaaagaaacaaaccaaaacaacaacaacagcaacaacaacaaaaaaccatactggatgattccactgatacaagtttctagaaaatgcaaactaatctatagtgacagaaacagatcagtggttgcctggggatggggttactcggagagcagaagggggatggggttgcacagagggacaagagggaatgttgggggtgctgcataggttcgttatcttgattgtgatgatgttttcataagtgtacacatgtcaaaacttgccaaattgcatgctttagaagtgtgtttatttcacgtcagtattacctctgtttttaaaattctagataatgacgactgcaaaatggcaggataaggacgtccaaaaagcctcattgatgaaagcaatgagaacgctggcaaaaatgatcagaatcggctttttcagacctctggaaattaaccaaagatttgcagtgaggaatgaaatttcagtgaaaagcaatatcctagcagccactggggtggagaactgaagccgagctcccccaaagcctcttcccggagaactgtcattatctgagctgcctctctgttccgtggaagactctacttgcaagactatctttgcctgattgactcggagcttaacccgtaggaacagcccaggggcatttgttaaaaagaagaagaaaaaaaaaaccaggcaattatttaacattgcaggtgcctgaggcagtggataacaggttggggggggaaataggctaacaaaaatgtttaacaggaaaatctgggggaatgagacatccatagggagatctgaaaagctcctgcatactcctgggaacctcaaaggccatgctcatgcccagggctgtacacgtgctcatctcccactaatcgttaggcaggcagtgaaggctgaggcagagttgacagctgcctggctgagtgttgacggcatgccccatcactgtacggagctcctcagcatagacggagactcttcagttccagatgcttaaggaaatctctgcccaattattcgatggccactaagctaagcgagcagagacttcagtgggcacacatgataaagaatatagattcgacagaatttgtccagaaatcactaaacaaataacaacaataacaagtagaaacaacaaactcggggaagggaagagaatttgatttctagaattacaacattctattatattaaatgtccagttttcaaaaaagagttttagagatatacaaagaaattttaagaagtctcaaacatggggaaaaaagcaaacaatagaatctgtccctgagaaagcccagagattagagttacggacaaagactttaaatcagttgctttaaataggtccaaagaactaaaggaaactatgtataaagagctaaaagaaagtatgagaacagtgtatcaccaagtagaaaatacaacaaagagatgtaaattatttctttaaaaaaattctggaggtgaaaagtacaataactcaaatgaagctttcattgtaggggctcaccagaaatttgagcaggcagaagaatggacaaactagaagacaggtcagcctgtccagcttgagaaacagaacagcagcgaaaacaacatgaatgatgaaaaatgaacagagaccttcagagacctccgggacaccatcaaccacacaaacacacacatcatgaagtcccacaaggagaggagacagaggcaagggaagaaagaatatttgaaaaaataacagccaactcaactttgatgaaaacattaatctacacatcctagacgctcaacaaactccaagtagaataaactcagagagacccacacccagacacatcataatcaagctgtgaaacgtgaaaagcggagagaattctaaaaatagcaagagagaagggactcatctcatacaaggaatcctaaataagattaacagatgacttattagaagtcatgaggccagaaagcagtaggatgacatattcaaagtgctgaaagaaaaagactgccaaccgagaattgtataatagtatagctatccttcaggagtgaaggagaaattaatacaaataaataaacaaaataaaatgataaaatataaataaaattatataaataccatgtattatatataaaactatatatattaaaaattctaaatataaatacaattatatatgtgtgtgtgtatacatactatatatcaatatttttaacagtttttaaacaaaatctgagataattcatcactagcagaccagataactacaaggaggtctacaggctgaaatgtaaggacactagacagccactcacaccaacttgaagaaataaaaacattagtaaaggtaaccatggaagtcaatacagaagacggtgtgaatgtatttttttaatcttgtatgcttagacacagagttaccatacgtgttaagctgtttttatggagctataaatacctgagaccaggtcatttataagagaagaggattaagtggctcacagttctgcaggctgtacaggagcataagggcttcttcctctggggaggcctcaggaaactcttactcatggtggaaggtgaagggggagcaggcgagtcacgtggtgaaagcgggagcagcggggtcggggaggtgccacacacgtttaaacaccagatctcacaggaacccagagtgagagctcactcttcaccacggggatggctcaagccattcctgagggagtcacgcccgtgacctaaacacctgcccccaggccccacctccaacacgggggatgacagttcaacacgaggcttggcaaggacatgcgtttaaactgtatcaccatataacccgggaagtctaggcccgggctgatactcaggacaactgaaaacgggtccgcacaaaacttgtgaatcaatgttgatcaccgcgttattcatcatagccaaaagataaaatcagcccaaacgtccgtccgctgatggacaggttaaaaacgtggcccatccctgcaacgaaatgtggcccagccccgagaggcatgaagtgctgacgggtggagcgacacggaggagcctcagaaacacccaccatgctgctgcccggaagaggcagacacggaaggccacgcgctctatgacctcatccatgggaaacgcacagaggcgaggcctgccaggggctgggaggagggggcacaggagcgccggctgtggggatggtgtttctcccgccgggggtggctggctcaccctggcactgcaccgcagtgggggtggaccggatgccgctgaactgcctggactttcaagaggtaaattccgaggtatgtgaattacattttaatttaaaaacattctgtgagagcccatttttgttaaagatgccatctatgcttaaaagcctgcaccaatgccaggccgtaccactgtgggccctggtgcctccacccaggaagcagtccagctgcgagcccaggccaatggggccagcacggatgggagggggcgtggaggggcccacagatgctgcggcccagcctggcctgagaggggccacctctgtgctggggctcccaggcacccacctcccgtggcaactcctggctccggtccgctcccagcccttctgtggctttggaggctgaatctgcctgcatctgccattgatttccaattccaaggatgttgtgtttacagtgtagtgagatgggtttgtgtttctgcaggagattctagaagccagacctcggagtgggggaggtgctaggcctccctcccacctggataacctgacccggagcctggggaagctggctcggcacccccagccctgacctctcctcgtgggcctggcacggcaggctctgggcacagccaggacccccagggcctcagtctagcccctcattttccaaggaggcaaccgaggcccagccaggctttcaaggctgggcagagccagcctggaactcaagtccccaacaactcccagtcatggaatgttgtacaagaggattctggcagccaaccctgacatctttaaaaatgttctttctggcccttaactactggggcaccacagttcctcggctgtctgtctttgtgctgggctgtgcctggctttgtctgtagctgtcagtcctattttgtccgctaggaacaaggccagggcagcctctgtgatcccctcgagctggccagtcttccctgacccttccctctcggcccctggccttgctgtagtcatgtccatggacacctcctgcccaccctggcgggcaccactgtgtggacacagtcctgggaggggtggggggcaccactttgggaacggagggtctgaactctgccctgtctttgagcctttgttttccttgtgtgcagacgagtgctccagccaggtcctctccaaagtctcggccccctgcctggtgcaatctctgcctgacaaacccggccccccgaagtgctctcactccttcaagtctcattttgttaacagggggctgttcttgtggagggtcccacacccattgtcttagctgaccccacagcaggcaggtggggagggcagggatcttctgcccactctgaggacaaggagacagcctggaaggggtggctggagggtctggctctgtcctttccgctgcgctgggccaggagcaggatcccagttgcccgactaccctgtagtccacacctggaggatgctgtcactcatgagtgccccggacctggggcgctgtcctggcacttagcaccccttccagatgagggggcagcccaagcaggcacctagcaggtgggagacagagctgggcctggcaccaacctggcttccttcgaggctttatgggtcccgggggcatctgggaaaactcttgagttgggttttggtagcaggaacgggtcaggccccacatcccaagcagaggtcgtggggactgggaggcagctcgctgccctaagaggacggtactggggccccaggcccagagatgagcctcgtcccaccccacgtgatacacccctccccctgcacgcggcaggcccctcacagggctctactccaggacgtgtgctggcggctggggaggcccgagaggatggtggttccatggaaatgggagagtggacactgtccagggcgccggtcccagccccagggccagcgaggtcaaggtctccttgctgggccttccttccactaggggtgaccacaggaggtggtgtgaatgcccgcaggggctgttctgatcaagtccactcagcctctccctgtctgcgtgtcaagggcacgccagcaggcagggcactccctgcaccgccgcacaaaccggcatcttcttcgtcctgacttgagtggcctccagccccctcccaagcccctcacccaactccctccccagctccctccctaacccctccccagatccctccccagcccatccccagctccccccacagctcccaccccagctccctccacagctccctccctagctccatccccaacccctccccagccccctccctaacccctcccccacccctccgcaacacttccccagatccttgccccacccttccccaaccccctccccagcccccctccctgacccctccccagcactctccccagaccctccccaggtcttccccaagcccctctccagcccctccccagctcccttctcagcccctgggtgtcaaggctgtatcgcggcctcttgcaaggacagaccagctggccgcggtgctggctcttggactttctggagcagctccctggaggcctaagggggcaggggcaggggcaggggcaggggctgacacagtcgttcagcctccgtgcccagcccactcacaggagagttagcagggcagacgccagaccccaggcggggactgactatgggctcgggacaacagtacctcgaggggcagcagcctccaggtgagcagggctgactcagtagctgcacgggacgttgggcctccagcctggccgcattcacacctggccatcctggcaagctcagggctgagaccaagttctgggggtgcagagccgcgcctccaggcctgttgccccagctcagcatctcgggatccactgccccagcatgggtgccctgcagggggccggtcctcccgggacctccatgcggggacatgggctgccggacctcccgggacctccacgcggggacatgggctgccggacccaccccctgctgccacggctggatccagggccgccttcctctgcagacactcgtgggcagggggtgggagcacgagcctagggaatgcaggacaccccgactgcagttctggttcagccgcaaaccggctgcgtcctggcccctcgtggccacgtgggtgcgtgccatgctctcaggcgtgtggggctcccatgtccacggctcctgcccggatgcccctccacgtctgtgtacgtccctgctgctaccaggccccgggctgagcgagcgcgaccaaggcccagcctcagagcccacgctgcctctcggcctctcctgccccacaggccctggcccaagctggtgtccatgctcctcgctcagagctctgccagcccgtcctccctggcttcctgccactctctgtgcgtgagtcactgggcaggagccaccacgccaagaaaggaagccgatagggtggaaagcgtcctcagtgtgtgtggtcaggggcactggcctggccacctactgctgtgcccccaggacgagtgacggggggcttcttctcagggtgcacttggagtcacagacaccccggggcagaagagccatgagtacttgcggggtccaggcttcggctcgcgcagcttaggctgaggcggtgcggaaatctgcagggtctggttttggatccgatttacgtctctgctctgtcgccaaagttttgccttttccggaatgttacagaaatgaggtctcacaggatgcggcctgtctggcttccttcacttagaaaagcgcgtttaggactcgcctgtgctgtgaagtgccagcgcgtgccttttgcccccaagattctgcggtatggggggtccgcagctgttttatcccctcgccggtgatgggcacctgagttctctccagcgcgtagggggttacacaccagcatctctccacattcactcccgggttttgtgtgaatacaggttttcggttcattcgggtgcacgcccaggacaggtttctgttgagccctggctcctctgactggagggtccgcccggacaaaggggtggtcacgctggaagtgctgagtgtgggcgaggaagcgcagcagcctcagcggcagtttccagaatgctcttccttggcgggcagaggcagcttgctgggaacccgaggctctgcaggttttgcgagtttggtaagaaggcatcacacgtgagacgcacaggtgcctgcaatcactcgtcctctacggcagcagccagcaactccctgaccacggaggtggggatgggtggggccaggccacgtaacaagcggccctcaggacttgtggccttcccatccatgctccacgcccagcatgggtgcctggaggtgttgtcctcactgtgttaatgcccatgacacaggaacttgggggagagatgccagcatggcgcccagggtggagtccctgtggggcagcctgcgtggggcgccgctgtgacccaggaatggactgagagcccaccaggggaggacggtgagcaccgtccctcttgggtttcctgtggaattgggggtgggggtctggccagtgaaatctccagcgccagggtgcccatctgacacccggctgcccatgtgcagtgtttgccagttactgtggtgtaaatattcctgcctggctgatctcaaagcaaagcgctgagctaagctccacacagtgactcggacagcaccgcacagcggccccagcacctgcgcagcacggactccctaaggactctgggcagagggagttttaggggtgcaacaacagctgtgaggtccccggggcatcctcccggccacctgccaccaacacagcccagcctctccatcctggaggcccctgccccgggtcctgcagagccacgtgatgtttgtctgatgccctctgttttccagctctgctctgaggcctgaccgtccctggccgccaagtgtctgctgactgagagctccagctccggagaggtgcccagtacctggtgagcagagggacctgaaggagcaggtgcctcttcctcagacatctgcagtcacttcacagtgaatgaggctccagccgggtgccctgagaagtggccaacaccctacccaagaggagaccgcacagccacggccaacgtggagctctaactcagggctccagcctccagcccagtccttttccttgagtagggacgacccccacagcggcctctctgcattgcttaggtggggagcacatgtggtgaagatgggcagcctgcaggtgcctgctacacgtgggggccacggccgacggaaagctcagtcatgagtgaaaacagaggaaatgtttctgaaaatataacaagtcagtgggaaatcaatttatcaaaagcaatttaaagcagccttgcaggaacacaggtccacactggcaaggccatcgctcacctgtgggctgtgtctgtccatccactcaacagatccatgagcctctgcccggcgccatgcccagcccaggggcgccagccccccgagctcatggccggggtggggctcctgacagattcctgtgggcagtgagggccgaggtgctgaggtgccaggcagcctggcagcgaccacagttctgcttgaccctgcaggggggacgtttgcgcagagccgccgtactgcccggtcgggggtcccgggcactggtcacgcccaggactggccccacggccaagatggtgccgcacagcctggccttttgtcaggttcccgggatccacacagatgcgagccccaaccctgcacagagccccagagccctggaaccctggctggcagggacagacaagagtgaagggttcctattccccttttctgagaacggaagggccccctgggccgctgtctggtgagccgctgctctgcacagggcttgtctcgggcgagaggtaggcagaactggcctgggaagcagctctggccatgcctccccaaccgtcttcagggagccaggcccgtgttaccagccctgttctccccggagaggcagggtggcacacagtgccttccccaagaggctcctagcacgaagcacagaagctgctccccctgcgaagctcccagcccaaggtgaggggacagggcaccatcccgccaggctccctgccaaggtgaggggacagggcaccatcccgccaggctccctgccaaggtgaggggacagggcaccatcctgccaggctccctgccaaaccttctggagggtgggtcaaggactgtggcatgggcagaggctccaaggacatgtccaggttcctgtttcagatgagggaaactgaggccaggggggtccccaaaccactccctgcagggtcagaggttgagctcagcccggctgagccccactcctcgtgcacctgtctctccccgtcccagggaggctggaaggtgtctgatggggcccaggccaggggacccctcccaccctcagaagatggggactggggcgcaggaggtccagagggggcaggccagactctggctactgtccctgctgccagcccgcggcccggtgcggggacagctccacacagcagggatggcgagggcgtgcaggaggaggccaggctgtctccactgccaccaccactgcccaagggacgcctctacggcacagcactcgtggccctgggtggggtggagggagagccaggccagcgaggcttcagagtccacacggcgctggcgtctgaaccagcagggctgtgggacctgagcagccacgtggcatcgtctgccacaggcccgggcctcccccggcacccctggccactgtggaggctgcagtccggtgccacctcccagggggcaacttcagcctgtgctcctcctcctggccgtgagatgggcccagggcctgccccgcacagctgtgtgtgctgcctcagaccgagcccaccactgagggagatgcaggggcccacacacagctgctaccactcggccccgtcggctgttcccctgcagggctcgtgtgagcgacccccatcgccgggggaggaggaagcagcccggggcccagctcccagagctgcaggggcatcaggacagtggctccctcccgcctgctgtggaggtggccttgaggcctcagcctggcccccgccctgccaccctgctcagcccagcagcagaaacaggactcagggccccatctcagagggcaggaacagagctggcattgggccgagcacccccgttcccagctgctcagggctgagcaaatcacagctctgagcaactctgacccttggcacccaccctcctcccggagcaccacagttcccggggcactcaccctcctcctggagcaccacagttcccggggtacccaccttcctccccggggtacccaccttcctccccagcgtgcccaccttcctccacggggacccgctttcctccagggatacccaggtgccttcctctcagggcacccaccttcttcccaggcacctacttttctcctggggcacccaccttcctctgggggcacccgccttcctccaggggcacccactatcctcccaggatacccatcttccatggcacccatcccatcttcctcccatggcacccaccccatcttcctcccagcggcatgaggctcccagggagctgtgtctgcgagggcagcatgtctagcctgtgtccagtcctgggcagggagtctcacgacagcctccagatgcacctgcacctgcccagccagggtggccttgaccaggccgtgcaaacaccagggcctggcctctcccacatggggtcatctgctcacccagggagggctggaggctcaccccacagccccttcctcctgccacagggaacaggggaccagggcatcctccagagcagtccccagggtgcagatggccccagagcccccagaccagccccagccccgggctcctggaccatggctggaagggatcctcccgctcagggctggagatgcctggcctggcaccagctactccgccttctccaaggcactttaaaaaacacccagcagcagcacctcatcctcagggcacccgcaaagctgaagatgcagacaaacaatacagggtgagactcctggaggcgacagggctgagctcgtgccctgtgagctctttcccaggttacagagctgaaaggagcccagggacctggaggaggctgtgtcaactgccgtctggtggctggaggttgagaggccagcagccgccagcctgcccacgggcactcagacccacggccagcggcttctggagcaggccagcggaggcagtgaagccccctcttggggtctgtttcttgcttccacccagagccactctgggatctttttgatgtgcccttggatgcccttgttcagtgaggggggcaggcaggggcaggcggaacagacctcaccactgagcggcccccagaggtcctccccagcctcccgaggacctcagaggggggccctttctctcccctgcatcttggccaacgggtcctgcactggagctggggccttggtcagactctaggggcctgaaagtctcctccttccccactgaggctgggaaaggaggcaggtgggcctggaggctcaggcggggctgctgctgggcacctcactggctctgcacctacctgcccatggtgccagctgccttgccgctgcatccccaggtcacacatactgggaaccccatgtggccgcccccgcaagttttgcagaacccgtcccgagcccccgcgtgtctttcccaacatgggtcccctgtggggggtgggtgggaccctgtctttcccaacatgggtcccctgtagggggtgggctgggaccctgtctttggctcccgttccacaccttgccctagccggcaagggctgcagacccggccgacaggccaagcttgccagaatcactggtcccatgcaaagccaacacccaactccaatgggcggcaaagcgccgcaggcacagagcctcctttcatctctgcagcaggctgagtttaaaaagcagattttctacacaatgtcgtacgcgagtctcagcagagctcaggccacgacctccagctgcctgcaagcctgcatcttcctctgggaggcttcccccctcaccctgcatcagggcccgggcttgaggggtgatggaggcaggttcccctgcagccggcggttctgggagcaggtgcccgaggcggaggccatggcctctgagcaggtggcagcttcgcccccaccagagcctgcagccctcacagcatcccacattgccccagcctctgcctgggccaggccctcaagctgctggctggggtgcccagactgtggaggcagtggttgaaggccaatggctcctggtgtcattaaagactctgtttttacctcctctgggcctcgggagaccagcctggcaccagaggaggggctggcagagccccaggctccagtccacacccaccggccccaggtctggccatgggctgggccctggtgtgcagacagcagtggccactgctccagggcctttgcaccagcctgctgcaggtccaggcggtcatggggagtggagccgcagcggcctcttgttttccttcccctcttgggagacggctgctcctcctggctgtttccagaaagtgtgtttgttatttggctcctggaaacaccatctgatgaaacaggctctgttgggctggcctgccaggcggaggctgtgggcgcccaggagtctcaccacgaagcaggtggcagaggcccgatagccccaccctgcaggccgggacctggcacctaaacggggagatggaagaacatggaaaattccctaagagcaaattgatgctcagcttccgcgggcaccaacttgctgcggaatcctgctttgcagatcatcgttcctcgagcattcggacgcctcgggccccagaagttcaagaacaagaaagctctgtttcatgcagacacgctcacgcatgcacacatgctcacacatgcacttatacgtgcacacacacacacacacacacaacacacacacacgcacactcacacaaccatggccatgtagccccagtctcagcatcatgtcctctatttagaaatattggctaaacacctaataaataactaaacagaaatgtaatctttaataaagtctcataaaccaaaagccagctggcagttccatttggaacatccatgaacacagctgcatttataggaaaacttctccgtcagcgatgctcccatgtgtgacagccgcccccagatgtccttccttcccctccacaccccctcacagcccagggccctggggacaccggtgccgaagggctggatctgatggacaggccaaacccgggccacaggccacagtactgagcaggcggggccctcagggagggacggggctccctgggccagccctctgccagccgaccaagactcaccctcgatggtgccctcgacctgtcctccctcagcagcctgtggcatccagaccagttcgtggcccctaggaggggaaactgagtcccagccccagggtcctccctcggcttcactgggtgccccatggaggagacagccagggtgtgtcacctgacaggtggggatggggcaggtgggggacggggcaggtggggacaggacagggttggactccaaagggaggccggcagcactgtgtcccggggatgctgacagtggcccaggaggggtcagatctcctccccagccagcagcagggccgtatgctgggaacaggacctcgtggtgagcaggtgggaaggaggtgggtggagatggtgggtagggctgcctggaagactccccagggatggccatgtgtgttgggagcactgctggaaggatggtgtggccaggaggaagtcccagggacaggggtgaggaggctgggccaagagcctgggtgtgaagaagtcaccctcagcaggctgggcccatgggcccggggggtgctcagggagggtgaagggagatggggaggaggctcaggcctgccaggagccgggtcctggtgggcagcagagggtacggtgcctggcagcgctgaacgggagtgggcgggaggacgtggagccaggccagcctcagttcgggggtcctggggcctgtgtccagaggcgaggcccacacagcggcgggactggtcctgcaggcgcgtggccacagtgggcaggagtgggggctttggggccctggctgcccaaagcttgatgctagcctagggccaaccagaccccacattcagggcataccccacagcgtatcagacatctatagccgtgtagcaaataccccaaaacgtagcagcttaaaaatgcctccacgtgttagctcccccgtttcaggggcagcatggctggtggctgtggctcaggtggcagccacgggcagccccttgtccaggacggggctcacggggctgtggggaggcctcagcccctgaccatgtggcacccccaggctgccaagtctcctccaggtgccagaagccacagtctaaccccctaggcctggaagtggcctcccttgtgctgtgcccgccatgggctgtggtcacatgggtcaccctaaggccacgcgggcagggctgcaccaaaaacatcaacacggggtcagggcgtccgagccaccacaatgccagctcctgcagtgctggccacgtgcctggcaaggaaccctgcacacagaccctgctctgcccaccccccaggggtcacgaagcacacagaccctgctctgcccaccccccaggggtcacgaggcacacagaccctgctctgcccaccccccaggggtcacgaggcacacagaccctgctctgctccccccacgggtcacgaggccctcgtcctgctgggctagaggcggtggcctctgccctcctcatagtggctactgggagaccatgaggtggtggcagcagttgcctgtgcggaggtgtgctcagtgctcaggcagggaaacgtgcacacacacactctcacacacacacacacacacactcatgcatacatgaggaggggcttttgggggaagaggagcccagggaacatgactcctggcaccttccatggcgggaccaggggtcgggggtgcagcaggaactctggccttgaacccagtggctccgcctcatctggggctgctctcaccagctgtgcggcctgggtgactccatggctctgggtcatgggccgtgcttggtgcctggggggcccggccttctgtgcctcagtcttccccaccccctgcacagcaggctaagggcgcctgatccgtgggactcggggagctgagtgggaagatttttggaaagaactgccagggccggcatcagtgagggcacgagcttctggccgcctctgcccttcccattcccagctgccctgcaggtgcccgctgtggcctggagacgcggctgtggacgctgtctgcttgcgctctctcccttttttagcccgaggctgagcggtccctccggactggggtgcgtggcgcctggctcttgactggcaatggagacgctccccaaagctcctggaatgttactgaccgccgggctgggatggcgcgcacattcttctaggtgtggatagtggaaaccaaaccaaaatattagcacaaggctaagtttgttttacagcctcctgtaatatatgaggtgcttgtttggattttatctaaacaactttccctgcacacccagcagctgctgagttttggctcccggaccctggagcccctgctgccgaggctggggatggcggctccagaggtcattcctcccccggaagacacacgctggccttgggccaggggaccctcagcgacggggtcaccccaatgttctggaggctgcggttctgcttcctcctggggctgagctgagcaagctctagctctcgggccgagcgcaaggagggcaggagtgatgtctccaactgtgctgaggtctgccctgggtgcaagggccctgtgttttcagcgctgccgtgtggcccatggatgccccaggcccctggacagttgatgcctggggtccacactcctggacagggctctggacagttgatgcctggggtccacactcctggacaggcccccggacagttgattcctggggtccacactcctggacagggctctggtcagttgatgcctggggtccacactcctggacagggctctggtcagttgatgcctggggtccacactcctggacaggcccctggacagttgatgcctggggtccacactcctggacagggctgaggaggtggtgtccccagacttgccccagcacagctgtggggggcacccggacacccgccccggcctcagtctcccatcccagctggccctgacacgggtgcatgtgatgccctcctggtcttggcctctcagacccagctcagccacggccatccagacccttgggctccggtgtcttcccaaagctctgagaagcacccccttggggcagccggacccctgaccaccctccgaacctcggctggactccctgtggcccagtccggaagggttctcctcggaacagagggcagatgaggcaagagtcggtccgagttctgccctctggcaccggcagtgctgtgagggcccatggggcggctcagtggtccccagggacctcagccttcgggaaagtgcagcagagacctcaaggccccccacgctcagctaacgttgccctcgctcatccagagcacagcccgagctgcaggagggccaggagggcagatgctccacagctcggacagcatccataagacccgcgtggagaaaatagcaaaggccagtgtggaacggagaggacgtgaacggcgagtgctcggagaacaagcacgccagcagcgaacccagggggaccagcccgacagccagtgcactgagacaccggccaacggcaacgccccatcctcaccgcgaacgccactgtgacgcgctgacagtggatgcgaatgcgtgacacagacagcgagtgccagtgtgaccgtcacggctgatgctgagcactgcaccgacacaccacagaatctgcaggcccagggctcagctcctgcttgcggggcgcaggccggccccaccgtccgacgtacagaccagcatgggcaccttaggcctctccaccctcctctgcccagagcctgccaccatccgtgttacacaagagccaggtgctgcacagagaggccacgtgccttgccccaggctgccagctccagagaatggtccggggacgccatggtcatccggccccaggactgctcctgaccctcctgggacggatcctccgggcagagaggggacgccgtggtcatccggccccagggctgctcctgaccctcctgggacggatcctccgggcagagagggaatgaatcacattccggatggtggcttcaggtcagaaagctgtcaggtcacccaggtgccatgcgagctgctccccggagacggctttcggccttgggtttatcacagcggctgttttccgtctgccaagccaagcctggctttcatctcccctcgcacaacggtctgcttcctcagcctctgggcttatagtggttttcttttctactgtctgaaattgaatgtttagttcatctattttctattctctcatttataataaaaacatttcagatgagaagttttcctcccagcgtgtttctggccaccttctggaagctgccccgcgctgtctgccacggcggcatcagctcctctctgacctcacagcggctctggagggcatcgggtgagtgtccaagcacctctcacctcagtgagacacagggcttgtttccagccttcctgtgtgcctggggggtgcctcacgtgtgcacattgcagctgcagtggcactgttcccagggggccgacctcagctgcatgctcacccgccagagtgtggaatcccacaaacagggtttcatcaaacagtgacaaggagacaggagcaggccccatggtaggatgggaggggattgtctagtgagaaactcaagggaacaaccttgtcagaggcccacaaacccagagaacacagggatggggctcatcctggaatgtcaggagcaggacagtggcccgagcatcaggacataagagggccagaccagtgctgggacccctgggagtagcaggtagtagtgggcagcagcggcctcaaagaaccccaggacccccacccagggggaagttccaggtggggacaaggacagacaggacacctggtcctgagaagcgacacagaagccttgctgtcagacaggcctccctcaggcctgggctgcctggctctgagcccccagcaaggtttgcagctgtggggaggggagaagttaggggtcctgacctctatgcgcaccaggccggggagcagcagggcaggcagggtggggtcccgccttgggggaccacctgccaagggcagggcaggggcagggaggtggccggcaagcacgtccccgtccctactggctgcaacttcagtgacactgctgaaaacctgcaaccccaaggcgtcagagacacgactcctgagctgcagggcaggcctctgttcagccagggccggataccagccaggaggaaccctctgctgccccagaatatgaaattggaacagaaggttacgggccagttcactcatgggcagaggacaactccaaaacgaggccccagcaggcaaaatacagcccggcccaggaattcccgtccgtgagctcgggacttcagaaactcaggctgtgcagcacgcaggaggaaaacacctttcacctgccagcaggacaaacaatagaaaaacacaattttctcaaagggcaccgagaggaaagtcaataaaatctcctgacaaaagtgttccacaattaggaatgatgggcttcatccctactctgatagactgcgtgcataaaagcaaatgcctacatgctggttgagaatgcttgggtttgcctctgaaaccatgcacacgcacacgcacacgcacacacacgcacacgcacgcacacgcacacatgcacgcctgcccgcacacacacgcacacacatgcacacatgcacgc

SEQ ID NO: 97110 - DNA, 52412 bp, Homo sapiens
  misc_feature (1)...(52412): n = A,T,C or G
atgagctcctgagggcgcttcaaatagagcctgtctttgacagcgccgcctccctgctgccaggagctgaacaccaccatccccagcacacagccgccagagcggtgctggcacacgaaggagaacggttggttgcctctgtgcacaagtgtgaccggcacgtggcactgttaatttgttggagtccggttccctgttactctgcactggtcagttttaggcattttatggctactcccaccccacccgcaccgaccccggcaatgcacacctggtaaccctagtactggtctaaaaagaaaaccaacctagaataaggtgacgattgcaatccccagctgcgagggctggaaggggcctgcagagcccacctagccaagcctttcattttactcaaggggaagctgaggccggacaggcagagcagccgtgaccccgcgtgccagtacctggcactctacccggatctcctagctctgatgcagggctgtcctgcccgagaggtgggaagagggaaggggtgatccaggtcgtcccccaaaccccctgcgttctgaagccacgctcaggaaccccaggctgcgggggcccggggtcctagcggctgaggcgaacgaaaactacccgccccgggcgccgcctgcaccctccgttttggaagaggaaaagcggcacctcctattctccccacacgcctccccggcgggccgtccccgcccagcccagcgggcacctggaagcggagacagcccttgcgcagcacctcctggcagctccggccagccacgccgaacttcctcgggctgcgcagggcccgcagcttcacgctcttgggcttctggagcattgcagatgtcctcaagccctctgggtcccgcaggcggtggcacctgctgcccagctgctcagatccgtcctcgccctggccgcaggggtctgcacctggtgagctctgcaagctggcacaggccgggtgccgatcccggaaactacattacccagaaggcctgggaaaagtgaggcccgacgcggtcttgtgcgnnnnnnnnnnnnnnnnnnnnnnnnnnnnnnnnnnnnnnnnnnnnnnnnnnnnnnnnnnnnnnnnnnnnnnnnnnnnnnnnnnnnnnnnnnnnnnnnnnnnnnnnnnnnnnnnnnnnnnnnnnnnnnnnnnnnnnnnnnnnnnnnnnnnnnnnnnnnnnnnnnnnnnnnnnnnnnnnnnnnnnnnnnnnnnnnnnnnnnnnnnnnnnnnnnnnnnnnnnnnnnnnnnnnnnnnnnnnnnnnnnnnnnnnnnnnnnnnnnnnnnnnnnnnnnnnnnnnnnnnnnnnnnnnnnnnnnnnnnnnnnnnnnnnnnnnnnnnnnnnnnnnnnnnnnnnnnnnnnnnnnnnnnnnnnnnnnnnnnnnnnnnnnnnnnnnnnnnnnnnnnnnnnnnnnnnnnnnnnnnnnnnnnnnnnnnnnnnnnnnnnnnnnnnnnnnnnnnnnnnnnnnnnnnnnnnnnnnnnnnnnnnnnnnnnnnnnnnnnnnnnnnnnnnnnnnnnnnnnnnnnnnnnnnnnnnnnnnnnnnnnnnnnnnnnnnnnnnnnnnnnnncagggccggagtggggagcggggcgcggggcgcggggcgcgggcgccgcgggggcgcggtccccacctgggagctgggtacgaagcctgggtgcgcggtgcaagcgcggacggtgtggagttagatgccggccttgctgtcgccgaagagccggcgcggccccgtcgtgccgtatgccggggagctcagcacgggtgctgggaccgcctgccccggccgggacggcccatttagcgtggaatattgttttcagatccggcttttcctcttctggatgcgtagcacatagggggccagtttcagatgtgttctgctgagcaaaagtttgaggaaagttgctctgtccctatagagattaaagtctgatggttggttgttttttgttttggggtttgttttgttttgtttgcacttaagttcagatttctctgaagccctttcagtcgctaagatgacttgatcagaaacccataagcctttgagagggtctcgctctgtcgcccaggctggagtgcaatggcacgatctcagctcactgcagcctccgcctcccgggttcaagcgattctcctgcctcagcctcccgagtagcccgactaatttttttatttttagtagagacggggtttcaccatgttggccaggctggtctcgaactcctgacctcaagtaatacgccctcctcggcctcccgaagtgctgggattacaggcatgagccaccgcgcgcagtcacacttaaaagtcttcttaaaaagaaaatcagagacaagttttgtttcctagtcttgtaacaaaatggaagttgctacactgagtttccgtttaatttatagttaattgccttttaccatgccagcactaggaaaagtgtagtgagggatgagaccgccatggagtcatcgctgcctggggagagatgtactctggcatttgtcgggatgtcgatggctgcccctgggacaacagggatccctcatgcctctggtgaggaagaccagccaataactggatgttcaacagagctttgcttcttcccaaattgttaatggtgatttttatagaacctaaaagtggcatccttcagtgacattccaagtatcttatgtaacacttgaaggtttacacagaggggaccctagggtacaactggaaggtctttgggagggggtagactaaaaaaggaatccttttcaaataccagactgaggtaatagcattgcctccacagtccctgtgcatttctcttagctggttcttaaatgccagtactttgttttagatttgttgggggcagtatagcatactggaaacacccttctgtttgactgaaaaggtcctatatttatgtcttcgagccgtaacagagagtgttggttaggttcagagactagccaggctcggcggctcacgcctgtaatcccaacactttgggacactaaggtgggaggagttcaagaccagcctagacaacacagtgaaaccccatccctacaaaaaaaaaaaaaaaagtagctgtgcatggtggcatgtgcctgtagtcctagctgctcaggaggctgagacaagaggatcatttgagcccgagagttcatggttacagtgagctatgatcacgccactgcagcagtacagcctgggcaacagagcgagaacctgtattaaaaaaaaaaaaaaaaaaaatcggggctgggcttaatggccacgcctgtaatcccaacactttgggaggctgaggcgggtggatcacctaaggtcaggagttcgagaccagcctggccaacatggtgaaaccccatctctactaaaaatacaaaaattagctgggtgtggtggtgcgcacctgtaatactagctacttgggaggctgaggcgggagaatcacttgaacccaggaggcagaggtcgcagtgagccgcgatcacgccactgcactccagcctgggtgacagagtgagaccctctctcaaaaaaaaaaaaaaaaaaaaatttggagactggaacccaacagcctgggcacaagaggtattttcaaggtggaatagggagtgacaagccctgccctgaaagatgataaaaggggcctggcatggtggcttatgcctgtaatcccagcactttgggaggccaaggcgggcagattggccaggagttcgagaccagcctggccaacatggcaaaaccccgtctctactaaaataccaaaaaaaaaaaaaaaaaattagccaggcatggtggtgcatgcctgtaatcccagctacttgagaggctgaaccacaagaatcacatgaaccagggagacagaggttacaatgagcccagatcacgccactgcactccagcctgggtgatagattgagactcttgtctcaaaaaaggaaaaaaagctgatgaaaggattggagggcttcagagctgaagggtattaactttgagctttgattgtttggctggacttcagaattcaggacaagaagtgagggtcaggggagagttggcgcattgatccctagatggggagcccaccaagagctctggagttaggacatggatggagatgactggagctgggcctgaggcacgttcacacaataggaacttaggacttgtctgagggaggtgcttcaggtggggacaccaggtggttgctgtctagaaaagacagtgggatcagaaggaagggcaggcctgataagacctggcacactgttggatggggagtgggtgaagagagatgctgtggccaagggaaaagtacctctaggctcagagcccatgcgacccagaagtgccaggtcacgaaggagtgggagccatgggctgtgcgtttctggcataggttgcccagagtgcaggtggggccgtgcagctaacagtgggttaaatcacactcatcctttcaaaattctttttttgtttggttttttagaaacggggtctcactctcttacccaggctggtctcgaactcctgggctcaagtgatccttccacctcggtctcccaaagtgctgagattataggcatgaaccaccacacccagcctcatcctgttcggggggctttttaaaaattattttctgagttggtttagttttgtttttgtttaatatacagtaacatcttgcagtgaactttgtgcaaaaaataactagaatctcgatggtttatcattctattttagtgcttttgttcatacattccaagaaacattagcaataatgccagccaataattaatatattgaagtggtcctcttcgaattctcaatgaaagtaaaagaaagatctagatcatgcatcaagcatgtcaaaatacgtacagttttatgtgggggtatgtttatatgttacctcctattgggaatttcaattaatagtatatcttatcccagagaactttctgatggagtcttctttatcctggtttagtgaggagccttttttttttccccccgatgatttagacctaacccaaattggcttacttaggaggaatctgactggcttagtaactgaaaagtaacccagagtccctgagcaaattgggctcaatgtcctgtgagtcagtccctcaacctaactctgcatgaacctttttgtacttaatatgcctgcctgtcattcctgctcttccttctggtcatacacattcatttagcagttgttaatgctagcgcttacgttgcctttttccccttggtattgtataactaattaacatactggttgtattagtttcctaactaatagaaagaagtttgtgtttatattctagacatagcaaaatatcataaactagatggcttaaaacaccagaaattcattctggaggcagaagtcagatggctgcatgggcagggctgcactctcgctctggaggctgtagggcaggatccctcctggcttcttcctaaccttgggcgcctgctggccatcctcagccgtccttggccggcccgcttagagatgcgttgctccggtctctgcctctgtcaccacatggcgctctccctttgtgtggctgtgtctcttcccttcttagaagtcacgttgcattgggcccaccccgaggacctcattttaactagatcacacccacagagaccctattttcaaatgaggtctccttcacgggtaccacacgtggaacttcagcgtatccttttggggagcacaatccacagcactggtcaaactttttggacacatatttgggaaaagtcaagataacttaaatgatatcttaagcagaaccagaagcatctataaaagtgtttaacaaaaaaaaatagactcttttcaaagagatgggaaaattctgaatacttagtgcattattgtgtgtgttagcaaggcatgaaccaaccctttaaatgtccatgtgttagtgaattcctttgttttaaagaagtttttcctgctcttataaacagcccaaacgtgcagaatgccccacaagattggatttgtagtcgtcagctcatctggacacgaagacggcttcagtgcccgggagctcatgatccacgcgccaactgtcagtgggtggcggtcacctaggtgaggactggacggggcggggcttgggctgggaggcagcctcgggtccctgaggagggtacaggggctcctttcattcagagcctcagattttactatcactcggacatcaggaycaaggatgtcagcrtgcagtgtcrggcatctctttctgtttatatttttaaagaaaatatgttgaccctctttcccttataacattcacccacactcccttaagaagatgtgcaaatgtggaggagaaggaagagaaatgaggccccgtaactgtctaaccatactccctgatcacaygctgggctgcacattctcatcaagtttctgtgcagagattgtgagtgcagctttttttgcttttacagttgggctcctgtgctgaaagagtgtgtgtctaactgtttttatatgacaccaagctttaaccaaaagatatgtctttcacatttctcttaaacacgcgtatactttattaaaatgttcaattgggcacagtggctcccgcctgcagtcccagctactcaggatgctgagacaggaggatcccttgagcccagaagtccaaggctgccatgagctgtgatagccatgcactccagcctgagtgaccaagtaagatgctgtctcaaaacaaatgttcattagatgagtgttttgcttgattattttcctaaaacattgaagtctttttgcctctgctgctttggtctttacagctgagccccttcatgcactcacttggcatctgccctccgccctcagtcatgtgaataaaaacccaccctccaccccatcccacctcgtcagctctgtgcttttcatgacttgctttcaagcctgagaagttactatttattcctaacccgcgaacgcgtaaatatgtatggcattttaaattcagtgatataattctgtcttgcttttattcagaagtcaagttgctgaaaattgaatgtaaatctcatttacaattaaaatgtattttccttttggagtttttgaggagatgcaacaaataagaccccctgtccctgcatttcccrgaagtgagttctgaatgaactgagaaatgaagcaagagtcaagcagaaggggccagacagcgcctttgtcacccgcagagctgggattgcaggcgagccagcgtcctgatactgcccaggccrtggccgatgcactgcccatgcaggcagcattaacacggtccagcctgtggctggagggcaggaggaggagcacacccacgggggcagcccagcgctcygccctctcctcccagactccccatgaccctgctcatgcctctcccaggcaggagcatccctctgcagaggtcctgtacgctcacagcacatgttccgtgttatttggggattgaagattctcaagtatacacacagccaccctttttggtagtagttataaaaatcacaccagtatggttctcttgtgcattgacatggtattgctttaaagggcataacctacactcacttcagtaacgtgctttcagaggatgtacccaagaaaaggatctgtgtgcccttggtcaccacagactcccactgggtttggctcggggtctcttgacttccctgaggtcaggcacatcgcagaaagacaaaggaggataccctgaagccgagcctcccaatgacagtacaaggcaccctgttaccacaggtcatagaaaatgtgggaccctctacgtcggagctcagggcatagattgatgcacttccaggagagacactgacggggcggttaaagagatatagggagacccccagtgccgttcatgtgacctcagaattcagagagcctgaagccttcagagcaagacgtttttccaagaaaccgtaaagtttgcaccaaccgtagcccctgggcatccatttttttggttgtcaaattatttttagtttaaaaaatctgtatctgtcaatttatcttgaagggataaatgcatactagcctttttagctgtgtggtttcttttcatatgcagcttgaaaggtatttttgattcatctataaagtgttcatcagctacatttgagtagctaaatcataggccctttttggaaggattttttaaagtacagtcctacatcactcaatcatggggacattctttctgagaaatgcatcatcagtcgatttcatcgaacacctagagtgccctcaaacccagatggtacagcctactgctacacacctaggctctgtggcatagcctattgctcctgggctgcaaacctgtacagcacgtgacagtgctgaacacggtagcaagtgtaacacaagtaggtatctgtatatctaaacatagaaaagctaagtcaaaatacagtgttgtcatcttatgggaccgctgtctcatgcagtgcatgactgtatacaacttcaaagctttgccggttgtcttggttttctttaaacagttttggagttttttttttttaataaagatttttaactaatggattacttattgtccttatgttcagataatctcgccatgaatgataatatatgtgccctgtatttaaaagcagtaactatctaaagcagccctttactgacatgaaagactaaagaatttcatttcaaaagttgcttggtttcccaatttgtgccagctgccctcctgccccaaatgtgcctgtcttgaacttttgcatttttggaagcagtgtggggtctttgctgactgctgtgattctctacccaactcttagttatttaatacgttgtgttacttttgggctgggcccagtggctcacacctgtaatcacagcactttgggaggccgaagggggaggatcccctgagcccaggagttcaagaccagcctgggcaaaattttagccaggcacagtggcacacacctgtggtcccaactcctcaggaggctgaggtaggagggtcacttgagcccaggagatcaaagatgcagtgagccataatcacaccgctgcagcctgggtgacagagcgagaccttttcccaaaaaaaaaaaaaaaaaagttatgtcacttttgagcaaagaagctccagcatggcccatagcataggcttgtctccctagaccactatgcgtgaaaggcaggcactccttaaatattgataccttggggcccttaagcatttgagttcctgtggaaaatcctttggctccrtcctgcccactagtgccgcctcataagattgatttatcttatgaaaaactgcaggtttcacatcagaccatttactagctgccaagagtatgattcctatagggttacaggcagrtcaagtcaaatttyaattcccagcttcagctccaacaagaaaagctcgagagaacaggaatcatgtcgcaggcatctttgtaccatcagtacctacagactgttctgttcaaagtgggtgtgtggttaatgcttcttamctgcaagaatgagatgctagcatctagaaaccctctgyagaagttgttcagaaaatataaaaatgtgtttgctttcagattttgccagtttccacaagaaattgtccttcaaatggtggagagatgtcgaataaggaaactgcagttacttgctcaccagtatatgatttcaagtaaaattgagttctacattagtgaaagcttgcctgaatattttgcaccctatcaagcagagcggtttcgaagacttgggtaagaatgaaatttaaaatgtatcatggcagcttttaggctaattctacctgaaagctcttttttttttttttttgagatggagtctcgctgtgtcacccaggctggagtgcagtggtgcaatctcagctcactgcagcctctgcctcccgggttcacgccattctcctgcctcagcctcccgagtagctgggactacaggtgcccgccatcacgcccggctaattttttgtatttttagttgagacagggtttcaccatgttagccaggatggtctcgatctcctgacctcgtgatccgcccgcctcgacctcccaaagtgctgggattacaggcgtgagtcaccgcgctcggccctgaaagctcttaaaaatgaattgtcccttaacttttggtcctgtgttatgtacttctatttggttcaagagtacacagtttcttaacacctgcctcttattgaatgtgcttaaaaagcagcgctataatttctatgaattctgctattcaactctacttttcagatgtggaaattttcttaagaatgctaattagatgaccaatctggccaacatggtgaaaccgtgtctctactgaaaatacaaaaattagccgggcatggtggtgagcgtctataatcccagctacttgggaagctgaggcagaagaattgcttgaacccgggaggtggaggttggaatgagccaagatcacgccactgcactccagcctgggtagcagaacaagactccatctcaacaacaacaacaacaacaaaagaagaatactaattagaatttgagttctaggggtttttcctaggtttttcattctagacttagcttttattcaaacctgttgatcctgcataggggtagtctagctttaaaaaataaaacaataaacataaatgagcctattgagttcaatcagagtagggagcagttttattgaacarcacattttcaaattcttcagttgtgttttgtttttcagctacgtgtctctctgtgataatgaaaagacaggttgcaaagcccgggaactaaaatcagtttatgtggatgcagtaggacaatttcttaaactgatttttcaccaaaaccatgtcaacaaatacaacatatataatcaggtaagatgcatgcagcttcgcctttgattctgcccctaccttctttgtgggattatgtggtcacgtatcttttcttagatgmattttcaaggtgatcttataagagaggatctcttctgggagactgctgagctctctgagctgtgctgtctgatccagcagcctctgggcacacgtggccagtgcccaccacgaactggcctagtgcccagagctgctgccagcatcaccagacagtgggcttcagagactcagtacaaaaggagaacgcgaaagagttcatgagaacttttatgtcaattgtatgtgatgaaatgataatattttggatatgttgtgttaacctatatttttaaaattaattgcatttttaaattttttaatgtgcctacttaaccttaatgacatatgtggctcacatcctatttgtgtaggacagcacagttgtaaataaaccctcccaacgtgcacaaggtaaattccctggtggaaattgtggacacatgaatgttgcatgtaatccagaatctctccagcttcaggctgctaattcttcatctcttccttcctccctccctttctttccttctttttttctttttctcacatgattagtgtagtagaaatcaattgtgtccaaagcaatcttgttaattagcacaagcatttacaactctccctgccccctccaagaggaatgtgagcacccagcaaatcaaatctctagaccaagcgggtgagctggacaagagcgcaaaggtccaattaagctgcctggccccttgcagcataacacgccaggaagccagaagaatgagtcttaaccctgttccttcctccacccacctgcatgtatttaccagcaatgacctggctgttgtcttggttttctttaaacagtttggagttttgtttttttaataaagatttttaaataatagattatttattgtccttatgttcagataatctcgtcatgaatgataatatatgtgccctgcatttaaaagcagtaactatctaaagcagcacttcactgacatgaaagactaaaaaatttcatttcaaaacttgctcggtttcccagtttgtgccagctgccctcctgccccaaatgtgcctgtcttgaacctttgcatttttggaagcrgtgtggggttagtctacagtggttgggggtgcaggatggaaaagtgactccccacctcaggtgagactcaccaactgggaactgagctgtgttaacttttcattgtctaatttcccaagatccttcaaagatgagctccatrctgaatctcacgtggatgtctcattwtgaggctatgttaaaactttgggagtttttagctattatgatttgaacttttttttttttttttttttttgagacggagtttcactcttgactcttgttgcctaggctggagtgcartggtgcaatctcggctcactgcaacctctgtctcacaggttcaaacaattctcctgcctcagcctcctgagtagctgggattacaggcatgtgcctggctaattttgtatttttagtagagacggagtttctccacgttggtcaggctggtctcaaactcccgacttcaggtgatccttccaccttggcctcccatagtgatgggattacaggcatgaggcaccgcgcccaggctttaaatggttaaaaataaccatttggttagcattagaatactaacataatttatttaaaattctttgttaattattaaaaattatttatattggcataacattttaacaattaatacgctttgatatacatcatcccatttgataacagtgtaggtcagagtttgttataaaggggttaagtccagcctgggcaacatggtgaaatcctatctctgcaaaaaaacacaaaaattagcagggcatggtggctcacacctgtagtcccagctaccagggcagctaaggtggaggrtcccttgagcccgggaggtcaaggctgcagtgagccatgatcacaccactgcactccagcctgggtgacagacgagaccctgtctcaaaataagtaaataaaagggttaagtcatttcaaacattgtatatttaattctgttattttaacactttcttaggttgctttggttgccataaatatcattggagaccctgcagatttcagtgatgaaagcaatactgtaagtttggaaagttttaattcctaaggaagtaaatctatttataatgggagggagtcatttattttcacccaaaaaatrtgtcatttttataatctgcataaaattgactagtgaataactttcagatgatttttaggagctgtagcatatgaaacttttctttaacagttttrgctgtctctccaaaagatgaggatcaytgaaccttgctgacagctttatatgaaataaatcttgtagttaaggttttgtgttgttcctctttctctctgagacactaagcagatgttttgcccccaaaggcctctcgagagaagttgattgaccactaccttgggcacaacagcgaggaccctgctctagawggaacrtacgccaggtaagwgtcctgctccccatcaatgaacttcttttactttcctcagaatcctgaaagggtcagtcatttccaaaggattctggacttagagcctctaaattcagtttagagctggataagccactgattggattgtctgaaatttacataaagattaaggtcgctgttttatttagcacacctgcatttattttttttccttttttttttttttttttttttgagacagaatttcactcttgctgcccaggccggagtgtaatggcacaatctcggctcactataacttctacctcctgagttcaagggattctcctgcctcagtctcctgagtagctgggattacaggtgcctgccatcatgcccagctaattttttgtatttttagcagagatggggtttcatcaggttggccaggctggtctcgatggagtcttgctctgtcgccaggctggagtgcagtggcacgatctcggctcactgcaaactctgcttcctgcgttcaagcaattctcctgagcctgacctcaggtgatccacctgcctcagcctcccaaagtgatgggattacagatgtgagccaccgtgcccagccacacaccttcatttattgctcagcagagactacttcctttcttgtgttcaggtatcactagaagtttcctaaaatgcgtttagaacaaagatctgtcagccgtcctttgatattttatcagcacaagcaaattcatggtaaaaatcaaagatattaatggacccaggttatcagttctagagacatcaccttatggcctcttcaaaagtttattctttacaggagtgaaaaatatgtatcacatacgtttttaaaaacacaattttgccgggtgcagtggctcacgcctgtaatcccagcactttgggaggccaaaggtgggtggatcacgaggtcaggagttcaagaccagcctggccaacatggtgaaaycctgtctctactcaaaatacaaaaattagccaggcgtggtggcgcgcacctgtaatcccagctacttgggaggctgaggcaggagaatgacttgaatccgggaggtgaaggttgtggtgagccgagattgtgccactgcactccaacctgggcgatagagcragactccatctcaaaaaaaaaaacacacaccacaatttttaccaatctctctctacccgttaaaaatattttttctcactgctaaatttggctaaaaaaaaaaatgggtatggggaaagttcgtcrtgttaacaattgtaggctgggtgtggtggctaacgcctgtaatctcaccactttgggaggccaaggcaggaggattgcttgagatcaggagtttgaaaccrgcctggggaacatgycaaaaccccatctctactaaaaatacaaaaattagctgggcatggtggtgcacgcttgtrgtctcaactactcaggaaattgaggcaggaagatcgcttgagccgagatcatgccactgtattccagcctgggtgacagagtgagaccctgtctcaaaaaaaaaaaaaaaaaattayacatatttttctgctgctgttgccgcttcctctttttttttttttttagcagtgtaagaaccgggggtgaatccacttttggggagctaaagggccccgctgtgccatcctcggtcaccctctctgtcctgggcacctctttgggacagtggctcccttgccacctgcctgctgtggatgacaatgaggggactccattccagaggtgcctggtctaaaggaaagaagggaagggctgccatagttgccgcagtgagaaaaaaagaggaattgaaatgttttttaggctgagcgttatgtcgcacgcctgtaatcccagcactttgggaggctgagttgggcagaycacttgaggtcaggaattcaagaccagcctggccagcatggtaaaactccttctctaataaaaacacaaaaattagccaggcgtggtggcrcacacctgtagtcccagctacttgggaggctgaggcaggagaatcccttgaacctgggaggtggaggttgcagtgagccaaggtcatgccactgcactacagtctgggggacagagcaagactccatctcacacacgcacaaaaaaawttttaaataaagaggaatyccaaataatccttggctcttctctgacagcagcttcccaataaagaaaagatcaactttttaaacttyaatagaaatttcaaatttgtccgtgtttggtgtaatttcacttttacctgcatacagactgctcgcagaaagtgattaattcttgatccaggctcttctatttgcacacaacctggatcagattctctctgcagttgctcaggagccacatgcgatttgctgagcatgtgcactggtggacagcgagccttccctcctgcagaggctacaccgcctccccacaggcctggtgcagaccagagctgtcacaggcacttgtgagtgtggagtgctcagagagtagaggctattcatgtaatgtctataaaaaaataacaccaaggccgggcgcggtggctcacgcctgtaatcccagcactttaggaggccgaggcgggcggatcacgaggtcaggagatcgagaccatcctggctaacacggtgaaaccccgtctctactaaaaaatacaaaaaattagccgggcgtggtggcgggcacctgtagtcccagctactcagaaggctgaggygggagaatggcgtgaggcggagcttgcagcgagccaaratcgcaccactgcactccagcctgggcgacaagagcragactccgtctcaaaaaataaaaataaaaaaataacaccagcttctcagtctctccctcagatgcctcctttgtgtaatagaaaaatcacagtactcttcccatccttcaagctggcaattrgatggaagcactgtggggaaggagcgctgagagtggatggctacctccctcctgccagcctctccacaaagaccgcagctggggctctgcccttactgaagcaagtgcagtagggcaggaacaaccaaactgattaagtctttagtttctcagtatctccaataaagcttctttctgttattttgatttagactttaaatctgttgccttaatccaatcagccaggtgggatggcaggctgtggtttgcctgtcctgccccacgcccggggttttatgaaggttaagtgcaaggactgggaaaagctgtgtgactggcacgtgcgggcctgtgctggacatggaatccggkcattgccgctgggggttctgtaccaaagtgggtagatggcaccccacgctgctgctgaatcaacaggagctgggactgggtaccacaggacatgatgttcactttgaaggatttttataatcaaatgaagtctttgtgttcatctctgggacagcaaggcaacgtgacttaaagtgtcatatgtgttacactaaaaatagttaatgtgatcttgtagacaccccaaaatgtttcgctgtttagtcacccctgggattagacacagttcagagctgctggtgccgtcccagccgccagcctgtggtgctgctgtgagcgaagtaccgtgacctcaagggtggggagatgccagaggggggctgtgagtgcttaaagggggcctattcctatgccccacttgaattcattataatacagattcaccaagtacacttttacgacaagtgttttcattaaaaygtacctgtctcgaagggtgttcaagtcgccgtaagcagctggcttgtttaatggggttgatacagcagctgggacacttccatcctcatcctctcgttgcttggtgagactaactttactgtttacattctagaccctactgtagagctggaaaggaggaatagaggtcatatttaatcagaaatgagctattcaggtgactacaaaagatcacttatttctgaaggaatgtttttgatctcctctaggatatgatggttgacaccatacaacttaaccctttgagtaaaacctcagtggtagcaattcttaacctatcatgttcatcaaaaatactgtgatgctggctgggtgcagtggctcacacctgtaatctcagcactttgggagtccgagatgggtgggtcatctgacgtcaggagttccagaccaacctggctaacatggtraaactccatctctactaaaaatacaaaaaattagccaggcatgctggctcacgcctgtactcccagctgtttgggaggctgaggcatgagaattgcttgaacccaggaggcagaggttgcagtgagcccaagatcatgccactgcactccagcctggtcaacagaactctgtctcaaagaaaaaaataaaaaaatacaggctgggcgcagtggctcaggcctataatcccaacactttgggaggctgagactggtggatcacttgaggtcaggagtttgagaccagcctggccaacatgatgaaaaccygtctatactaaaaaatacaaaaactagccaggtgtggtgccacacacctataatcctagctactcaggaggctgaggcaggagaatcgcctgaacccgggaggtggaggttgcagtgagccgagattgcgccattgcactccagcctaggcaacagagtgagactccgcctccgaaaaaagaaaagaagaaaaaaatactgtgttgttataaaatayggcgcctggactccatcttgggcccactggtcacatttcttagggtggggcctggtcatccatttgtctttgtttttgtttttctccttgttctgcagttgattcacattcactgtcctattcccagggcccataacgaggcgaggcccagagtctgcactctgagcgaatgcactggaggctcagatgccctgaagtgcagtttggtccatggtcaagagcgtgagctttggagtcagaargkcctgcttgcaattaagagctttgtgacctgaggcccgttacttctctgagacccgttttctcatgcaggaaatgctctgtgaaccatgatggggcaggatggggaggggcatcttctcaaccgtgcatcttcagcactgaactcctagggcgtgaaattatctctaaaatatgcatttcttccctttaggaaatctgactatatctctccgctagatgacttagcttttgatatgtaccaagatccagaagttgcacagatcatacgaaaattagatgaaagaaaacgggaagctgtccaaaargaacgctatgattatgccaagaaactaaaacaagccattgctgatttgcaaaaggtattgcctttggagaraacagttcctaatttatgcctgtaataggttttaygtatacttagaataactacatggtaaaagaaaccagttactaaaakccgtgaagttagtgtgagttcaaagatctcagcaaaataaagttacggagacagataagcactttaaaaatgtaaatggaagcagaagctttacctcttcagactcacgttcaggtgtcagggtcagctacctcgttactaggaccctgagcccaatgggaaaataggaaaaccagctatcctgaaagtcataaccaamccatgrgcttattaaatgcccatacagcaacagcagccagacctttgctgagtgtggcccattccttccatttccctgtgctcactccctctccttgcaagacggttcacgcgtgattcttaaaaattagctttgcatttgatgtgagttgatccaaatttgaaagaaaaagcaaatattttgtgcttcaggttggtgarcgccttgggaggtatgaggtagagaaacgctgtgccgtggagaaggaagactacgatctcgccaaggagaagaagcagcagatggagcagtatcgtgccgaggtgtacgagcagctggagctgcacagcctcctggatgccgagctggtgggtgcaggagcccagacggagtggaggaaagcctaggagaacagagattcaactgtgtggttcacaacagtggatagatgtctttgaagtgtagtgtaaaacactctgcagtgctcaggggacagttatggatggcctcagctctgtgcctacgtcagggaggctttgcctcagcatgttctttcaggagactcacagtcgtgggaaagggaacaaaccggggtcaggaaaaccgaggccctgctgcttttctgctgcatcccttcatctctccagctgcttccttatttggaaaaggcagtgatgaccctgccccactgacccctcagtgttgtaaggatcaagtgagaacgtaatgctaacagcttcggtgtattgagaacatatttcccataaggtgctctgcctctgattttagaactcatgcaaatggggcactcagcccacgttacagattaggaaatgaaggttctgagatacrgaatagtgattgagagtgcacactctcaaggccaggcatggtggctcacgcctgtaatcccatcactttgggaggccaaggctggaggattgtttgagcccaggagttcgagaccagcctgggcaacatagagagaccctgtctctacaaaaagtaagtaatagccaggcctggtggcacacacctgtagtcctagctactcaggagagtgagacaggaggatcacttgggcccagaagttcgaggctgcagtgagctacgatcgcaccactgcactccagccttggtgatggagcgagaccctgcctctgaaaaacaagagagcacactctggagctggactgtctgggttcaaatccgggcaccaccattccagctctgtgatcacagactaattcttatcagctttatgcctcagttttccatcagctttcaaatgggggtaaamagagtaagcattaatgagcctacctgtccaaaacactcagtaccatgcctagtgtgcagcaactggtcagtcagctttgcttgttgggatgacacaacatcactttsctttgtacacacagtgaatagcagtgccagattttgaataaaagtccacttgggtccagcccaggtgctttctccacaccaccgtgctcctgcaggggcacatatgtgtggacatgctccatgcacaaatgctcattccttcactagcattttggatgtgtatgtcacttttgtagtcaacacagaaatgtggagagacaactgagatgagtgcaacttgattgtgtgggactttcaagtagatttcactctgtggaagtttctctttggttttgaaatttttcattgtgccaaggagcctcttccagcacagctttctaaagtcttattcatctgaaggaatgagatagatatatctggcgtggcagtggcatttgaaattaaatgttcctttttgttctctagatgcgaagaccttttgatttgcccctccagcccctcgctcgttctggcagtccttgccaccaaaagccaatgccctcactaccacaactggaagaaagaggaacagaaaaccagtttgcagaacctttccttcaggaaaagccttcatcatattctctaactatttctcctcagcattctgcagtagacccrttactccctgccacagatcctcatccaaagatcaatgtaggtaattctgtttcagattggcgttcaatttatttgggtrtttgtaaaggacatgtgttgtgccaggtgctgttcccatgcatggggtgcatgagtgctccccagccagacccacctctgttccattctaggagccatagtgctgagtgagagcatagccacataaggaataggcctaatgacaccttgtgagcatgtttattaaaatcaggcttgatgcttatttctaagcaataaactaagaaaatatcagagatcttgtcagaaaaaaagatgtaatagcctttactttagtagtctccatgtcagttgaactgaaattgctaccagtaaacagtcattgaggtggaatctaccttgcttttttttattaggtctgtaatgagtttagaaagtaatagaaagcctcatctaatcttttcaattacatcctatttgttgtataaattattctaatctgatgatactgatatttagcaaaataacatctttcagatcaggtaagtaagcgcagtaagcctgccagtgagagttgcastggagaatgtgacctatggagctccccagcactttcctctctccttcactcactgcaggcagagtccctgccctacgatgagcggcctcttccagctattcgtaagcattatggggaggcagtggtggagccggaaatgagtaatgcagacatcagcgatgctcggaggggaggcatgwtaggggagccagagcccttaaccgagaaggccttgagagaagccagctctgccatcgatgtgttgggagaaaccttggtaaaaaaaaaaaaaaaaaaaaaaaamcrgggtggcagaggggagggtagtctatatggtacgcacacctctgtgtacttacacataaaggagggaaaacgcccacggctttgcatttgtaatattgttgacttccctttgttcttcctgaattggaaagtcttttgttaactttttttttttttttttgagacggagtcttgctcttcacccaggctggagtgcagtggcaagatctccgctcactgcaagctccgcctcctggcttcaccctgttctcctacctcagcctcctgagtagctgagactacaggtgcccgccaccacgcctggctaattttttgtaatttttttttagtagagatagagtttcaccacgttagccaggatggtctcgatctcctgatcttgtgatccactcaccttggcctcccaaagtgctgggattacaggcatgagccactgcgcccggcctttttttttttttatgaaacagagtgtcactctgtcacccagggtggagtacagtggcgtgatcataactcactatagccttgaactcctggccttggcctcccaaagtgctggaattacaaacattagccaccgtgcctgcccttctgtaaattataaattatgtgaaacagcaaaaacatgagctaagatgtatcagtgagtactcatttcagcctgggtgtttccttctggcattcatggagcttgtattaaacaactgctcccttctgaataccagctaattccagcgcaaaaggatggcatagcaaaagatggaagtatctccttatagaaatgagtagagttggccaggcgcagtggctcacgcctataatcccagcactttgggaggccaaggcgggtggatcacgaggtcaggagttcaagaccagcctggccaagatggtgaaaccccatctctactaaaaatacaaaaattagctgggcatggtgtcaggcacctgtaatcccagctagctggaagaytgaggcaggagaattgcttgaacccgcagggggacagaggttgcagtgagccgagccactgcactccagcctgggcgacagagtgagastttgtctcaaaataaaaagaaatgagtagggttttccctcgttctcagctttaaaatatttctcttggagaatttaatactttttatattttaacatagtcttaaatttccttatcagagaaaattatttctctaaatatacatatttatttgtaaaagttctattattagaaatgaatcattttcatttataaaagttctgttcttagaaatgaatcattttagttaaaaaaaaaaacaaagccttcaagttgtgtagtgttggaggatggttgtgtgatgccatgaaatgctgcctgttttgtggtaggttgctgaggcctattgtaagacgtggtcctaccgagaggatgcactgcttgccttgtctaagaagttaatggaaatgcctgttggaaccccaaaagaagatttaaagaacacactgagagcatccgtctttctcrttagaagagccataaaggacattgtgacctccgtgagtgccctcagctggcgctggctccagcgtgcatggatgagatcatgcrccgtaccacagaagaccagagcagcttgagagaggaccagttggtcattgacgtggtcaccaactgtaactcaatagaatcactaagaaatgaggttctctagcaagagctatactgtgcaactgatcttacatgaagggtctgggaaatctgcctttscttgggtcattgtctctggtctccagcagtgttagcttttccatggtctgcaaagccaggcgtttgtagaggcctagttcaatgctaccacatcttcagtttgtgttttcactttgcatgaaacctgatgaggttgagaattactgttttttctaatgctgaatgggccttaagmatggacattgcacagttgggcttctaacagcccactgaagcagggctgttagatactcagtatgaagggaagatttgggcttacccattgaagcagggatgttagatactcggtatgaagggaagatttgggcttacccattgaagcagggttgttagatactcggtatgaagggaagatttgggcttacccattgaagcagggatgttagatactcggtatgaagggaagatttgggcttacccattgaagcagggatgttagatactcggtatgaagggaagatggggagtgatttctgacagagtgaagtaagagcatatgtcctctatatgcaaggtgctgtgtttagaaagcagttttcagtttgcmaytttcagcctttcagacgagatgtcattttcgatataatgttcrtatgtgttactgatagtaaatgccatgtttcctcttggtggaattgcaccgtagtaactcatccgtgttcatcacttttctcttaggtttttcaggcttctttgaaattgttgaaaatgatcattacacaatatattcctaaacataaactgagtaaacttgaaacagctcactgtgtggagaggaccattcccgttttgctcaccagaactggagattcttctgcccgcctccgcgtcacagctgcaaattttattcaggtctgaacttcaccacggcatttgaaaccgtagatgataaacatattcctgtagctctctggctttcttaacaccttttacaagattctgtctctactcagttaacattattctcagggattcaccatcacactttccttatgctctaaaaggtcagttttgtcttagacataaacttcagttaaaatctacagttgggtttttccaatgttttttttatccaacatatgccattaattttttaaataaataaaaacayacagaaaatgatatcaaaagagaaaatctgagggtaaagaaataaaaaatataactgtcttaatagaaatattttcattctttcaccaaatrtgcctcctctaggctagatattatgggaaatattgagatagagataaatgtatgagttttggggcacacagttatgcaccataatttgaaaatctttaaactagctaatgaattcatctagtctaggagttcttaagagtcctcctttgggcttaagaagcttatgaattacgttaagttttacacaaaattttgtgatgtgcagatccttcttaaaaaagaatccaggccagactgggcacggtggctcacacctgtaatcccagcactttgggaggctcaggcaggtggatcacaaggtcaggagatcgagactatcctagccaacctggtgaaaccccttctgtactaaaaatccaaaaattagccgggtgtggtggcgcgtgcctgtcgtcccagctacttgggaggctgaggcaggagaatysaacccgggaggcagagttttcagtgagccgagatcacgccactgcactccagcctggcgacagagtgagactccatcttaaaaaaaaaaaaaagaatccaggccaggcggggtggctcacgcccataatcccagcactttgggagaccaaggcaggcagatcatttgggcccaggagtttgagaccagcctggccaacatagtgagactctatctctgcaaaaaatacaaaaattagccgggcatgctgatacacccctgtagtcccagctacttggaaggccgaggtgagaggcttgagcccaggtggttgaggctgcagtgagccgtgatctcgccactgtactctagcctgggtgacagagaaagacagtgtctcaaaaagaagaatccaaaggggtcatttctccaaaatatgaggaaccacagatctagtttcatttaataaacctaaattttcagagtaaataaggaaaaggaatgctaataaaaaggtaagaagaaatgctgtcatgctaatgtgctacactacactcctggttatgacctacactacactcctggtcacgacctacactacactcctggtcacgacctacgctacactcctggtcacgacctacgctacactcctggtcacgacctacgctacactcctggttacgacctaatgtgctacactacactcctggttatgacctacactacactcctggtcacgacctacactacactcctggtcacgacctacgctacactcctggtcacgacctacgctacactcctggttacgacctaatgtgctacactacactcctggttacgacctacactacactcctggttacgacctacaatacactcctggttacaatacactcctggttacaatacactcctggttacgacctaatgtgctacaatacactcctggttatgacagctagaatttgggggtgaggagggttcatctttcaaaagatatgttgcaaatgagcacatgttattgcttcatttaattatttttaagccacattaatttctgagcagtttggtggtgctcaaatgttctctctatgtgagacaaccttaaggcaatctatcgagggttacaattgtgcaccagtgtgccggttagtggacgaaatacacactcaacagcatctgtttgtagttaaggagtttactgtccaaamttccctggagaatgctcttcttctcttagcttttagatttgtacagagtcactcacaggcccaaatccagagtgagtcaggccagcacgataagagattattttaggtgataagacctgcagacctattggaaacaggtttatttctgattgtaacttaatgattcaacatcttatttttttctctatatccggttaattaagtgataaatatcttaattacgtaaagacttgtttgtttagagacattcaaatatgtaatggtacttacattttttccatcttaacccactggtgaccgtatcactgcagaatcatacactcttggctgacatttaataartactaaaataacggtgattctagcagcagctctaatttcttttagaattttagaaatgagaaarccttttccttgaagctgagaayactgagaacagaaaccttcaagttttcaattacgcttctgaaaagctttcagtagacataaaatcgttttattcttcatgattttatttcctgtggctcagattttcatttctaatggttgttacgctttaaatagaaatacaagcttacggatcagtgctctcattgctccttgtcactatcaatctgtatttccctgtttttcccttcagtgtttagtttaagatcatgctgaattgtactaaactgcctccagcrttttccagtaaaaattaacaaattaccttggctttcataggaaatggccttgtttaaagaagttaagtctctccaaattattccatcctacctggtgcagccattgaaagcaaactcttcagttcacctggcaatgagtcagatgggcctcctggcccggctgctgaaagacctgggcactggcagctcgggcttcaccattgacaacgtgatgaaggtaagcrgacctcrcgtgtgacacaccacrcggcccrgcactcaccacagtgcctggagcgtggcgagggtctcatcggcatttgttgaaggaatgactgaggcagtgatttcagaaaaatagccagtgtttcatccaacaaatgggggcccccacatgcgtcctgctgtctaatcctactcggtggtgcatggtgtgtgcagatctttatctgtggagagaaacaaatcataaaaaatatttctttgtctttttttttttttttttgagatggagtctcgttctgtcgcccaggctggaggtgcagyggtgccatctcggctcactgcaagccctgcctcctgggttcatgccattctcctgcctcagcctcccaagtagctggtactacaggatgcccaccaccatgcccggctaattttttcgtgtattttagtagagacggggtttcactgtgttagccaggatggtctcgatctcctgacctcgtgatccgcccgcctcagcctcccaaagtgctgggattacaggcgtgagccactgcgcccggcctgtctttaagagacaataacagcagtgtgatggagaatatcaggtacaggttgaagccccttatctggaatgcttaagaccagaagtgtttaggatttcagattgttttcggattctggaatacttccattatacttactggtttggatcccaaatccaaaaacctgaaatctgcacatcggctacgcaggagcgcacacctccaaggaggatgagaaactgtgggcccccgagacgcacagcagggatgaaattgcactatagccacagcgttctgtttcttaaaaaagatccaaaacaagcgtgatgaaagtataacacggcttacgatgagacggtagatccrtgaggttttatgtttgaagtatttcataatacttaatacggatgttttctcttttatttttcacatgtttataaygtaccttttttgtaagctggaagaaattagttttattttaagaatsagtmamaagagcccctcccaactttagttttcagtgagtgccctggagcatagagtgtatgaggtccgcgagackgcggttcgaattattttggacatgtacagrcagcaccaggcttccatcctggagtaccttcctccagacgacagcaacacacgcaggaacattctctacaaaacaatttttgagggatttgctaaaatagatggcagagctacagatgctgagatgagggtgagttaactttggtgaagttgtgatgtcatcctgtgttgaagaagttactcagttactcggtacgtaaataagtaaatatgtcatttgaaggagccacrtgtatgggaagccccggcgtcctggctaagaaagaacacaggttcccgcattcagatcccggctgctccactttctgccagtgagacccttaggttcccaggctgcaaacggaataacgatagccgtgaggacacagygggtttatctatcaatagacaccaatgaaatcaatggaaaagacttattctaacttgttattagtcttagtgaatattataatttataagaaatatagttgatatgccataatwwgtctcccagtttctaagattaccctaacaagctgttctaatggaaaaataattttcttaccaggcacggagaaaagyggctacagaagaagcagaaaaacaaaagaaagaagaaataaaagctttacaagggcagctggcagcactgaaagaaattcaggctgaagttcaggttggaagttaacacgtctttcacctgtgtgcttttagctgaratgtattttgctgtatagatccacatcatacttgacttatttttcatgggattatgcaaatgagcrtcttgattccttttggttttttaggttagttttggggtggatgacagaagccctccatggagaggtggaattgggtggcagatactcttcctgcccctccatcctctgtcagaattgatgtgagctgctgctgaggtttagggagggaccaggggctgtgggcmcagagctgctctcctccacagctctccagccaccttcagaggcaaaggagaaaaatcagcttgactataaaggtctgacttcagcgcattaaaaagggaaggtttcaggtaaacattctgtttctatgagcccttactctaagcctgtgggggtgtcatatgtactgggaacaaatactattyggttgaatataaatgtgttcctcttcagcctcccagcttctgggatatgaattagcttcataacactaattttatgatgaagtttccttcagttgaaagaaaatttccttaaaaaaaagatataaaggtggcagaacacagggagtttccgttccgcagacctgagttttcagccgtgccrggtgaatgagttctgggacctgctggcacctcaggcctgcagcccacgtggctgcacagygcacgcagagctattcagagggcagagctcatgtcaagtgttcttaccacagatttttaaaagaagaaatgggtacgaatggggaaaaaagatcaaatgtggctgaatataggctgamcttcctatggcaaaaagtcaccgtgacatttccaccaaatgctggaacgtcagagtcacaatcagaaaaggacacaggaggcggaaggaggcaggcagaccctgggatgaggagtgagcctctggctcaggtccgcatcgtggtgtggatgactcgtgtgctcagtgaccctcagtggctcagcacacactcattgtgattagtacacaaacgaggacacggatgtcgcaaactgaagggatttccctccagccatgagctagcatgtactaagcccattgccaggcgcctgcctcccgcctccctcaccacagcccaggacctggtggcagtggctccagaagcagcagccgcccaggagctattcccagcactgtccatcctggggtctcctatgctcatgggcacacagcactgtctgtcccggggtcgcctatgctgatgggctgcacagcctccacacagccgtcctgagagcctgcagctcttgctcattggctcggtgtttatggagcgcctctccgtgccaggcgccatctggctgtggaaatacagcaggcagcaaagcaaagtcccaccctcatggagctggggctccagggaggagcagacgagggagaaagacccaggcagtgggtctgtgctgyggggtgctgggggccatgggttgtgggggcctcgaggccagcgcagacctgcgccccacacrgggcctggtgaaggcctctcccaggagaatgacgggatgggatggatttttctctttttttgttggggtaaaatgcacagagtgtaaatcttaccattttcagtgcacactgtggtggcatggagtgctctcacattgttgtgcaaccatcgccaccatccatctccagaactttcagaatttacatattaagtccttttctggttctaaaatcatactcttggccagacgcagtgactcatgcctgtaattgcagcactttgggaggccgaggcaggaggatcacttgatttcagaagttcaagaccagyctgggcaacatagtgagacctcatctctactaaaacttaaaaaaaaaacttagccagacatggtggtgagcacctgtaatcccagctactcaggaggctggggcaggaggatggcttgcacccaggaggccaaagctgcagtgagttgtgtttgtaccacttccaacctaggcaacagagtgagaccctgtctaaaaataatgataataagaacaaaattgtgctctttttaggggcagggtgggtgtctgtggaactagaattgcacttctgcatgtgttttccacagtcagtggttgagtttgagagaaactgcagtggcatgatctcagctcactgcagcctccacctcccaggctcaagtgatcctccctccccagcctcctgagtagctgggactacagggcacgccaccacacccagctaagttttgtactttttgtagagacagggttttgtttgccatgttgcccaggctggtcttaactcctgagctcaagcaatccaccactcaccttggcctcccaaagtgctgggattacgggcatgagccaccttgcccagccagtagaaattctaaaacaaaacccagaaatgtgctttcrtgatgaaaacatatcttcaacaggctctcactcactcacactgcagccctttgcccctgacctcactgtttytgtgtcttaggaaaaagaaagtgatgctgtgaagccaaagaatcagggtatgtaaagaattggggtgcacaaagaactggggtgtgtaaagaatcggggtgtgtaaatgcatgtcatggaagctccatgtgggaacggcttctgtccattcagcaagtatcactgcaygcctgctgcacctcagccrtctcccagctgaatggaaaacaygctacctttttacttgtataatcgttttagagctcacatcaaactgcttactaaaattttgaaaataatttctataaaaagttatttaaattgttttaatctcttcagacattcaaggagggaaagcagcccctgctgaagctctgggaatcccggatgagcactatctagataagtaagtcgcgctgtcttccacccattgtacgatggtcagggcaaccagccacacagaaaccctggaaagggaatgcgtcctccctagttggcccttcgtagtcatcataaaaggtaggaaatgtgccttctgcactaaccagcatccactccgagtcagtcaagacaactttccctctgtttattgtaacttaaaatatcctttctgcttgacgatgctgagtgaaatttcagaaggatcgttcgcccgttgatttcaggcacctccttggtgaggactttcctatcgtgctttaacacatggcacacccagcctcctctgccacctgcaagggaggcccagcccgggccctgcagagcaaactgaggcagttycagatgagagggaaagtgcacacatcacagggactggggaaattcagaatttcctcgtgacgtgggagcggaacggccatcagtggaactagatccttacctttatttcctgctttgctttgctttcagtttgtgtattttttgtggggaaaggagtgaatccttcacagaggaaggtctggatctccactactggaagcactgtctcatgctgacaagatgtgaccactgcaaacaggtcaggccagcggcacagcagccagctacttgcatgagcgggaacacctggctgttgaaaggccragtcaaaaagctgtcccaagtcttagtattttcagaggagaggttgcgagaaaagtaactgaagccaagcacacacctgcaaatgcgtgcgagtcattccatatgacagacagcccagtgaaccggaaacatgctgtgccgccacctcccctcggggctccttccagagtcagcaggggtctgatttctgacaccacaaatgggtcctccttgctctttgagctttgtagaaacggaaccatgtggcgtcatgttggatttcttgctttatrgtgtccactgcttgaatggaccacagcaccttcatccaccttccgctgtgcgccagggctgygtccagtttgggaccatgataaacaatgttgccacagcgttctggtgtcttccaggatgcacaggaatgcactttcttgggttcacaatgtgttgtgggattgccaggtgtgctgatgctcagtggggctgcccaggagtgctccaaaggggttgtgcctgggcaccactgccagcagcacaggcactgcccccttcccacagtgccactgcccccttcccacagtgccactgcccccttcccacagtgccactgccccccttcccacagtgccactgctcccttcccacagtgccactgcccccttcccacagtgccactgccccccttcccacagtgccactgcccccttcccacagtgccactgcccccttcccacagtgccactgtcccccttcccacagtgccactgcccccttcccacagtgccactgccccccttcccacagtgccactgcccccttcccacggtgccactgccgcccttcccacggtgccactgcctcccttcccacggtgccactgcccccttcccaccgtgccactgcccccttcccacagtggcactgcggccatgcttcctgctgtcttggtgagttccccctgtgcctgtccctggtgaagatgaggtggagtgcctgtccttttgtctgcaggccttggctgtcctgcaaagcacctggtttctcaccggtttccctcgggttgtccrtctgtttttattgatttggggccgttctttatacacgtggatgtgagtggttggtcagtcgcatgaattgtgaccatctgctcccactccacagcatgcagtcttcgctgtctgaagtgtcttgaggaagagacgcatttttaatgttagcattgcccaccttgccagtctttttcatggttcatgctattcgtgtcctgtgtaacaagtcttccccatcccctatattaggcctttcttgcattactatagagaaatacctggctgggcaggtggctcacgcctgtaatcctagcacttggggaggctgaggcgggcggatcacctgaggtcaggagttcaagaccagcctgaccaacacggagaaaccccgtctctactaaaaatacagaattagccaggcgtggtggtgtatgcctgtaatcccagctacacgggaggctgaggcaggagaatcacttgaaccygggaggcagaggttgcggtgagccgagatcacaccatggcactccagcctgggcaacaggagcgaaactccatctcaaaaaatatatatatccctaagactggrtaatttatgaagaaaagaggttgaactggctcacagtgtgtcaagtcctgcggcctgaagttatagagtatatacaagtcattcctgccagagacaccaacgtagcgagagaatctcttaaaattcttttctgtggtcctgtttctgtgtgcattcttagaaatagyggggagccacaatttcaaccttgggccacactgtaaccactgagccactctgcgccctcatccaagcttcacactcaggccgaccgtagcttccccatccttgacagtggcccctgcccgatgctaagatgacaggaaaggaaggacgtggggtcttcagcaaagtatcacaagtgactccagacagtctgtgggcaaatgcygaagatagaagcctgtggcttacttcatgtgcaggcggcacagacctccctgggcaggggaggcgctcacaggctctgcaggctggctggagggcgctgccgctttctcagcaacatgctttgctctgtatttcgaaatccaggtggtcgagatatccagtctgacggagcacttgctgacggaatgtgacaaaaaagacgggtttggaaagtgttaccgttgcagtgaggctgttttcaaggaagagctgcccagacacataaaacacaaggattgcaaccgtgagtgccccttcccaggctcccgtgccctcgggtcaccaggggtcctcttggaggaagtgccactgctcttgagcctgtgcaagggcttggtgaattaaagggcacctgcgggcaggccagcagcatgtcttgtcgcctgtcattcagggagcgactgagtctttttaaaatcatttcagctgccaaaccggagaagctggcaaaccggtgtcccctgtgtcatgagaacttcagccctggagaagaggtgaggggcctggggagaagggaccagtgaagtaggtgacacacctgtggatggcagtggtggtgacagtggtggtgtcagtgcgggaccatagccacagagtacagtacatgagtgttcagggaggggacagcgtctagtgagccctgtctgagcagtcgttccgtttacctacgtgttcacatgatttccttccgtacatttatgaatggtttatcgaggagcytcaactcactgaggcccagcctgtgtcactgggatacagcatgaaatggttttattttgttctggtcattgcctttatccagataatgagaccctcagtgacatcttgcccagattctgtaacactgcgrtcccttttgcctaataaaacccagccctatttggttaaacgattctctttcctacctgattccaagctctcctccctgccccagtgcactaygcagtgactcagcaggctwagtggggacggccgcctcgtacacgcccaccctccacttccccacgtgctcggctcctctggcattggaggcgacgaggaggracatgggcgtgcaaggctccgtggcaattattctggccctgtccaacacgatgggctggcggtgccctctttatgccaggcagcgaatgctgagccctggggccctgctcaggacccagtttgggaatctggctcagccacttccactccaacctccttagctcctgccacctgcagtgtgtcactgtgtcctgctgctggctccccttgtcccagccttctgggatatggtaccagcaaaatggctccaacccagccactgtagctttctcttgaccccagaaaactcacaccaaacagagaagacagcccccagccgctctcagcgctggtgtctacccagttatctggctctctgtgtccctctgtctgtctgtctgtctgagtctctctctctcagagtttgaaatgcatcacagagtacacagaaaagtgacagaaaccctcaggactctcccttgtcacggtcactgagcttgygcaactagcaactcagcccgtcttgtttctcccgtgcccccacgtgctcccctctcktgtaatgttgaagccaacccagacagcacgttgttgcatctgtaaatgttcccgtcrgagctttcggaatcgggacttctttacacagccacagcagcagcctcagccttccagacgtcagtcacattgccgccatctcatcaggtcagaagcatctgattaccgggatccatagaaggccccggtgcctggttggtctgttttgaacaggttcattctctcgttctttttccttatgattcacttggtgaaggaaggagctgtttgccccgtagggcttctcatcgtctggatctgctgactacgtycccttgggggcgcttaacctgtttctctgtccctgtatttcctgtaaacaggaggtgggatctctgggcctcatcaggtgtgcacaggctcggtgtgagtgtggccgcttcacaggcratgctggtgtgtcccccgggaggcgcgtgatatgtgtgacggtggcagctgctgaggctcaaggcctaacccaccgactcaggaggggcctcattctgtcatccctccttcgttcatctgctgggatattcctctaagcagaagctcgtccactctgtggtgaccctaggttagactttctattggaaaggcagagtgaaggtttaatttttttccttggtttactggttttcagaatagtaagctgggtcactagcatcttccatggcagctaatttgttttgttttgtctgtagtgtcgttatgaaccatggatttaaattattcaatgtgttccagtcacagcagttaccatgcttagtgatgcgtgaattatcccagctctagcctatggcagactcttcagctgggctcctgaggcctggatgagagccacgcagcctcagagagctccctcctgtttggtgccttcctkccccggacctggaatcagccatctgggcacagaggcctggttcccattagcaggaatggatgtctcaggacagcgctgggggcctcatgcccactgctgctgggtagttcgctgtggctggactctcagtggacacagccaggagaaatcaagggaagtaagctccatcactcatgcacacacacttccccttcccgtcctgagctgcaggctttatttaaccttgtctctcccaacatctgtgtctcctttcttacatccatgggccccggtttccaaaggcccaggagacagaattcaggtattggaggcgaccagttcaccttggcccccactgcacctggggcagccccagcacagtggcacctgcaccgccagcaggagatgccactggaaattagatctgttcccagttcttgtcctgaccacatctgccactggtgacgggggtcccagtggccctgtgttggagggacttgggtgagccctggctagcagtgccaccaactgtaaatacattcattttatattacatttctaggggactttaaagaattaagttctgtaattacagaagacatgtttccgggtcgatagaatcaggcatcttggaagaaccctggacagaggccgccatcctgccccacttccatctgccttcctccaccccagacagaggcgccgtcctgccccgcttccatcygccttcctccaggggctgcttttcctacagggcatcctgccccttttctacccaatagaagcagttttcactgcacatacatcttttcccctggttatctccagaatgtgggagcctttgtgtttgcattcgagttgttacctttacttgtcctcccgtgcaatgcccatcatcccctctgatttmagttattgccattggtttcctactaggagcagtactcacattctcctgtaactgccttttcttccttcccttcttgttcccaacatctgatttgaattgacatcctcttacaggtagtacctgtaaggctgtcaccaggcgtatctcatgtgtcatctkctttccctgtatctcattatctgcactgccttacacatcaccacacacccttcagcataagcagaaaacacactcactcattacctcacgggttccctgggtccggagccaggcttcattctcatctgtcagccctgctagggaaggactcacttccaggctcatcccagcagctggcagtaatatgttcttgggggctgtcaacccggagccactcaactcctagaggcccccaccgtcagcaccgggggcctctctgctggcagctcacttcctcgaggccagcaggagactctgccactccagcctgctgagacacgtctttctaatttcgtgtgaattgttttgccattcgttcttcaaatatttttcctctcttcagcgttccctcccttctctcctgcctgcaggctcgtgagtgtgaagactgctcaatcttctgtgggtcactgggctttgtccagtgtttcctttctgttctagttgaatggcccctgccctttctccttccatctccagtcctctgttaagtgaattcattttcaatctggtactttccaattctagtatttgtgtttggctgggatttctttacaggtttcatttctctgctgagattcacctctgttcactcattaagatcacctgtttttaacagcttcatggagatctagtctgcacagcctctccccgtggacagatagtgggttttcatgtattcagggttctgcaaccatctgcacacgtgtggaacttttccatcacccaaaagacaacactgcctacatgccgccccttttctccccagccccctctccagcccctggcgaccatatgtctagttttggtctccatggatttgcctactgtggacatttcctgtaaatggaatcagacactatgcggcctttgtgtctttgacttaacgtgttttcaaggttcgcccgggttctaatagatcagtagcacttcattgcacgttcaagtccttgaacatactaggtatctgctttaaagtccttttgtgctaattctaacatctggaatttttctgaatgtgaagggggataaacagtgaagtttgacaccctccacactgctcagaagaaagctccgagtggatctgagattcaaatgtgaaaggcccaattatgaatctctcaggagatgctagagataagagaatagccttcagaataggaagggatttctcaaacaggacacagaaagcttaagccttgatggaagaggcagatcaattcaattagattaaaatgaagaaccttggggcagagtttgggttttgtaaaatgaaaagagttctggagttaagcatcgtgaacatgcttaacactactgaactgtacactcattttataataaaactattaaattgtaaaaggtgagaacctcctcttcatcaaagaacataaatagactgaaagacaatgctggggatgaaaaatcattgaccattattcttcaaagtgagtggaaggcaatgtccctgcagggtttgagcggaagagtgggcatgrcctggcgggccctatgccagccagttttgctgctctgttgagagcagcctgtgggacagagaggtcgggtagtagcagagagctaagtggcgagaagtggtcagattctggacacacactgcaggcagacccaggacttggccggtggagtcctcacaacatggcaaggaagtaactgcggtcaggaatccagggcgctcaggagcttagcctggagctgtggagttaaaatccctgtcagacgcgcaggccggtagacaggtggctgcaggtggaaatgtggggtttgtaagcgtgtataagaagtgggtttaaggtcatgatactgggagcactcttctaaagagcaagtgtagacagaggagaagccccaggcagagtgggaggaagaaggcaaaccaggcgctggggaagaaatgcactggggaggaagcctgacgagggtggcgtcctggaggccccagagcacagcccatcagagaggatgccctgctggcctggctgggttcagctgatcgcagccgcctggctcttgcatctgcacttggccatagggcggccaggcggctctgctggccctgactgggctcacacacgcgtgtgcctggggtccgcagccggagactgattgagaatggtcttggaggcagctgcggcacctcagctttgctttctgtgtctgagcccagcacgccagcctgggcayggcgttctcgcgacagcagcagagggcaacagcaagacaagcccaggcgcatgagttcatttcagcctgccctgcsacgtgtctgccactgtcccattggccaaagcaagccacagtcacccagattcaagggatggagagggacctgccacctctgtgctggggagggaggaattggagccttagagcaggtcatgtccctccacgggggagggggaagcaactgcaccccatgtgccggtgggccacattctggtgagaaggcgccccagctttagggacacgaaggttgccagtggcctggagagaccagaacccaggcctgccgggagcagctaaagcgggacaggagtgggctgggctggggctgcaagcgctctagtatcttgagggctgccgcaggtggccagaaactgacagccactggtgagagtgagagaggaaccagggagaagcagggctgtgtctggtggagatactggtccaccagagaatgggagagcggctggagcagtgtccctgggaagcgttgtttgtttttgagatggagtctcaccctgttgcccgggctggagtgcactgatgtgatctcggctcactgcaacctccgcctctcacgttcaagcaattctcctgcctcagcctcctgagtagctgggattagctgttggggacacgagatgcgccaccacacccagctaattttgtgtttttagtagagacggggtttcaccaagctggccaggctggtctcaaaatcctgacctcaggtgatccacccacctctgcctcccaaagtgttgggattacaggcgtgagccaccgcgcccagcctcgtgagtgttgtttaaatagaagggaaggaaccaggaacaactcgaatgtccagaagactcagggaaccagcgatcccgcgtttatatccaacaggaggacgagatgagctccctgtccccatgcagacggtcccacagctggtcataaaggaaagaagctggctgcccaggcagtcaggcctgcataagccccacattctgcagggcaagtgcatgtggygtggctcaggaagagcagggatgaagagagtgggaaccccacgaggaaccgtgggcagcaggctggcggggagcccgcggtgcctggcgcgttctgtcttctggcctggaacgtaatcacgcgggcgctctgcttctcacccttgcatttgcgtgcacgctctgctgtgctcagagtcactgacaccaagggccctgtgtggctgggtggggatgcgagatgcaggcttgcctggtgacaggacttcttgcttcctgagttgtaccctgcacagactgcagaggctatcataacatatccgaagggaggtgcccaggtgagggagccgttcttctgcggctcttgctggagcggccgccctcgttttcagcttacacagcgagtccttttgggtctcaggtagcgtgccaggtccgtctcrcctgattaacactctgtgtgcctcctctgctgcaggcatggaaagctcacctgatgggcccagccggctgcacgatgaacctgcgcaagacacacattctgcagaaggccccggcactgcagccaggtgagggacagcgccgctgagcaggtgtagtctgcatccctccattttgacttattcaaaaragcatccccgtccagggcaacatggcaagaccccatccctttaaaagcaaaataaagcatccaagcctgtcttcrtgttctggttccttagtaagcaggctaataatcagaatcgtgtgaccaaaatccttctccacctgcawactggctgtgcagtgcgaaggctccacgggtggcctaggattcacactcccgtcctccgctctttctacatcactgactcaagtgtttagaatcaggaagctggccaggcacagtggctcacgcctataatcccagcactttrggggctaaggcaggcagatcacttgaggtcaggagttcgagatgagcctggccaacatggtgaaaccctataaaaaattggcmgggcacagtggccggcacctatagtccagctactcaggaggctgaagcaggagaattgcttgaacccgggaggtggaggttgtggtgagccaatattgcgccactgccctccagcctgggtgacagagtgagactctgtctcaacaaaaaaaaaaaaaataggaagctgaagagtagaccctactaggctcagccctggctcctgtagtcgggtgacggccatcagcatgggcctgggacrttgttgctgggtgtctgtggccacaggttctgcacctggtccgtgggtaggagtgcccctcctaatgcrggtcctgtgcttgctctgcagggaaaagctcagctgtggccgcatcaggccccttggggtcaaaggccggaagcaagatccccaccccgaagggcggactgagcaagagctccagcaggacgtacgccaagcgctgaygcggcrctcgggctccttggtctctgtgagggatggagcgggtctcctgattctacaccatctctccagaactctctggccttggtggccccatgctctggctgctgtccccagctccccgccgtgcacgcctcttacgcgtctgtgccgtcagctctcgtgcaaacgatatggatgcagctaaccaaagatcctgcgtgcagtgccaggacctggccgcactgtacattaagccttcagggctgtctcaggccttccttagaatcagagaaggaagcgtcctgtttggagagagccagagagcaccrccagggaggcgctcgcgcaaggccacggtcagcacaggcasggtcccgctttccttagtgcttggagcaatttccataaaacattcaccagaaaccttttgcacatcggtctctgccacacgcagtagaatttccgcagggctgtggctcggccagcagcggttccaggagagtggcggtgcgcacgggcctccagccgtgccttccccctgcaggccccgtctgctgggcctgctgcccagtgcactcagccccaggtagcagaactcacgttcccactatagcaagaaataaaggcaaaagagaacatcttttttttaatcgtagtttttttgagaattggtcccacctcagccgcaccttgctggatgcttctccagtagtgctgcccctgtgacaggcatcagctccctgctggaactgaggtagacacaggtgtgggcccttcccgtgcctttgctcagaggcgcttcactttctccacactttcgaattcctaaagacatgtggaggaagtcactgttaaatgaatttccacctgatcaccctgtgttcacagcaggcagaagcccactggtatgggcctcccgccccttccacatccatgttgtgattggatccataagtttactttcttsaaagagttgataggatgtttaaaacatcaacacattgcttaaaatgatgaaaccaaccctcaaaaaacagtctcctaaccagccatcccctcctgtgggagtgagctgggggttttgtccatagctttggttgggcctgtgtcacatccaggcagccatgtggagggagtcagggtctgtctggaagcatccaccctctcgctgccccagcctgtgctcccaggggcctaggctaccatggactgaagggcagtcccctcccacctggtgcccagggcttctgcttgcctygctgatgttgcatgggcagacttcaaaaaggatagttagaaaggtttgggttgatggagtttgcattaatgcaattagtgtataaatatgttttaattgccaaccgtgtgaaacaacaaaatatctaaaaactaatcccgatttgaacaatgtactccctggcctggatacattaataaccataaatttgcatgaattaatctccacgtttggtaaactaatacctctggttgactgagaatactgagtaagatataagacctaccaggaacctttaagaatatgctctgctcggtgttgtttgtctgcttgtttgcgacggagtctcactgtgtcgcccgggctgcagtgcaatggcgtgatcttggctcacagtaacctccacctcctgggttcaagcaattctcctgcctcagcctccctagtagctgggattacaggtgcacaccaccatgctcggctaattttttctatttttagtagagatggggtttcaccatgttggccaggctggtctcgaactcgtgacctcataatctgcccaccttggcctcccaaagtgctgggattacaggcgtgagccaccacgcccaggttaaatgtgtttataaggagagaggaggccaggcgcggtggctcacgctgtaatcccagcactttgggaggccgaggcgggcggaccacctgaggtcaggagttcgagaccagcctggccaacatggtgaaaccccatctctactaaaaatacaaaaatgagccaggcgtggtggcctgtagtcccagctacttgagaggctgaggcaggaaaattgcttgaacccgggaggtggaggttgcattgagcccacatcatgccattgcactccagcccaggcgacagagcgagactccgtctcgaaaaaaaaaaaaagtataaggagagaaataactttaaagtttattagacaaaacagagtatagatgccaagatgtctgtaaaatgattttttctggttttaaagagatgttggccattattttctaatccatttttaaaatacagacaaaacacttctttaaacagaacaagaatgagaaaagttaaccaaggaattattcttttctcaccaatcaacacttttaagaaatatatatatatatacacacacatatacacatgccttctatatattgtaacttaaagaaaatacttataaaaagacttcatttttagtgattgacaagcaaacgggttcatttaaaacaggttcctcttttgttagttacagggggtttttttgttgtttttttgtttttgtttttgttttgcgggggtggtggggtttgagacggagtcttgctctgttgcctaggctggagtgcagtggcgcgatcttggccccctgcaacctccgcctcccgggttcgagcaattctcctgcctcagcctcccgagtagctgggattacaggcgtgtgtcaccacgcctggctaatttttttgtatttttagtagagacggggtttcaccatattggccaggctggtctcaaactcctgaccttgtgatccacccacctcsgcctcccaaagtgctggaattacaggcatgagccaccgcgcccggcccaatcatgtgtttttgttgaaatgatcctaccagtgattagtggctattgagagttttacagggttatacattgttaagggaccaagaatcaagtacaaaaaattaaaaaggaactgtaaaatcccttggtcattcataaataaatatctmaattaggaatactaattaattgaattttcactcatgagtatgttctgaatatttaatatttatttctattattttcatatgttaagatattccattaaatctaacttaaaagaattgtatgtataaattggcattaggatacaaatgtaaatgtttttaatgaaattttgcaactttttaatattttaacatagttttctatttgtctttatttcaagtaccagaattacaaaatatctaagtaatatatttttgttgtcgttttagggcttaagggttaattcacccagagtatattaatataataaaaagatcactaaatgttttgtcactttatttcaacattacaattaaaaagtaatttgtcaattacatttactttaataaacatggaagtgtagcccagccctgaaaccttagaaagtagattgaaaattgctgaaaaaagacacggcaaatatgaagttgccctgagggtttggtccctagaataagtaatttgtcaaaacaagttcactgctgaagaaactggacaatttgaagccacatggagattagagaaaatgattgaccagtttcatcctgtggaataaattcagaatgttctctaagttctctaattgtgcccagtagaggattatactttctagtctcttcatgggttttcccccctttgaaagagggattttaccagccctcaaggctgttttgcttttcaactaagcactgtacggtggtcacctgcctactgcccaggaaagccgggggcagtggctgtggcacccttgattggaaagctgggtgggctgagccgtgggaggagggtaatggccagggctcgggcagtgagcctgtgagcctaccctgcggggaggtgtggccttagactacccagcgggacggaggcgggtccgcggaatcctcaccacaaccatgcaaggccggtgttgtcatcctcaacaacagagtagagagttagcggtcaggcacacacagccacagctgcaggacaaagctgcccccgctgccctctgactgcagggaggaaggtgctggtccagaggaaccttggcactctctggatcttgaaaatagtatgggggatcctgactccactgatggatcagttaccagggagtgtttgaccacagcttgccgctgcctcagtttcctcacctgtaaaatggaactgagggtccctttgctgtgcactgaagaggacacacactctaggcactttccagccctctgcacagctggcctcagggtgtcaggcacctgcccctaaatggggagcacttctgagggtcagctgaggtggggcccagccagcagagggcagtgggcagcccgaaggcaggggagcccccactgcccacccacccagctgcaaactcccaccagagcatcttccaaactctgctgttcccagggcatccgtgcttcctgagaatgaagccctggagcagggccaggcaggggaactttttttttttttttgagacggagtctcactctgtcacccaggctggagtgcagtggtgcaatctcggctcactgcaacctccgcctcccgggttcaagggattctcctgcctcagcctcccaagtagctgggactacaggcacctgccaccacacctggctaatttttgtaattttagtagagacagggttttactatattggccaggctggtctcgaactcccaacctcaggtgatccacccacctcggcttcccaaagtgctgggattacaggcgtgagccactacgcccagcctggaccttttttttttaattccagagacagggtctcactctgttgcccaggctggagtgcagtggtgctaccatgactcactgcagtctccaactccagggctcaagccatcttcccacgtcagtctcctgagtagctgggactacaggcacaagccaccacccccagctaatttttgtatatatatgtatagtagaggtgggttctcaccatgttgcccaggccccccacaaactatttgatcaccaacatcagtgtcctcagcaacccatttgcctctgtaatgtggatttcacacctcctgtgttgtggcagactgctgttactacttgagaccatcattatgagactgaaggaagagggacaaacatagaaatgaaaacttaaaacaaaagtaactattttaacggaagggtaacacggggaagaagaagagagctccctgcttctagtgagcaaaggcaccgcccgagcttccacagcccttcctatttattgggtagcaggaggagggaggaggaggtaacgatcggtcagctgcttaattgatcacaggttcatattgttactaacaggcttcagatgtacctaatcacaagaaacactgtgcttgaggcgtgactgccctcagcattccttctaggtggcagacgcagtttgtttgccaacattctgcatgtatgagaaacagtttgctgtttactcacgtcgcctccagtggtatactgagttgatcatgaccctcactctttcagcgtgcaacactgtgttactctaggtagcagcgtcaggcagcattctgtttcctggtgctgggaggtgaatgtgccccacaaattcacaggctggaaactcactgcccagtgcaacagtatagacaggtggggcctgaccataggccctgccctcatggttggatttgtgcaacaataaaaggacttggggccagacacagtggctcacacctataaacccagcctttgggagaccgagatgagaggatcaccggcgtccaggagttcaagaccaacctgggcaacaaagagagaccccatctctacaaaaaatataaaattagctgggcatggtggcatgtgcctgtagtgccacctatttgggtagcagaggcaggaggatcacatgagccctggaggtcaaggctgaagtgagccatgatcatgccagtgcactcagcctgggtgacagagtgagaccctgtctcaaaaaaaaaaagtgggccgggcgcagtggctcatgcctgtaatcccagcactttgcgaggccaaggcaggcagatcacctgaggtcgggagttcgagactagcctgaccaacatggagaaaccccgtctctactaaaaatacaaaattagccaggcgtggtggcacatgcctgtaatctcagctacttgggaggctgaggcaggagaatcacttgaacccgggaggtggaggttgcggtgagccgcgatcgtgccattgcactccagcctgggcaacaagagtgaaactccatctcaaaaaaaaaagtgggtggggggtcttgggtgtgggatccccctccaccttccaccctgtgaggacacagcctgccttccctctctccctccagaggatgcttggactcccagcctccacggctgttagaaagaaacctctgctttctataaattaccctgtctcaggtattttgttataacaagcagactaagacacctgatcctctttgtttattattgtttgagatagggtcttgctctgtcatccagactgcagtgcagtggtgtgatctcagctggttgcaaccttcaacctcctgggctcaactgatcctcctgcctcagcctcctcagtagctggaactacaggcacatgccaccacacccagctaatttttacatttttgtacaggggaatctcactatgttgcccaggctggtctggaactcctgagctcaactgatcctcccacctcagcctcccaaagtgctgggattacaggtgtgagctactacaccccctgagtggtcctgtctaaaatgcatccagtggccaggcatggtggctcacacctgtaatcccagcactttgggaggccaaggcaggcagattacttgcggtcaggagttcgagaccagcctaggcaacatggtgaacccctgtctctagtaaaaatacaaaaatcagtcaggtgtggtggcaggtgtcagtaatcccagctagttggaggctgaggcaggagaattgcttgaacccaggaggtggaggttgcaacgagccaggattgcgccactacactccagcctggatgacagagtgagactccatctcaaaaaaaaaaaagtgtccagtgctgggagttgccccataagaagagagtggctggtgctcagtggaggtgctcaagctaagggtgccctgtcccctgaccctagccaccctgaccttggcttctcagctgtctcctcaactctgggagtctgctgggctctgccacccaggctggagtgcagtggtgagtttgatatggtttggatctgtgtccctgcccacatctcataatgaaatgtaatcctcagtgttggaggaggggcctggtaggaggtgactggatcatgggggcggatttctcatgaagaggttagcaccatccgcttggtcctgtcctgataacagagagttatgagatctgcttgtttgaaagtgtgtggcacctccccctcactctctagctcctgcttcgcctccgccctgagtaaaagctccctgatgcctccccaagaagatgctcatggccatacttcctccacagcctgtagaaccttgagccaatcaaacctctttataaattacccagtctcagccgggcacagtggctcacacctgtaatcccagcactttgggaggctgaggcgggctgatcacaaggtcaggagatcgagaccatcctggctaacacggtgaaacccgatttctactaaaaatacaaaaaaaaaaaaaaaattatccgggcatggtggcaggcacctgtagtcccagctactcaggaggctgaggcaggagaatggcatgaacccaggaggtggagcttgcagtgagccgagatcgcgccgctgcactccagcctgggcgacagagcgagactctgtctcaaaaaataaataaataaataaataaataaataaaaataaattacccagtcttaggtaattgccctttacaaaccttatcacaacctacactgaccatctacaacatgtttggactttctgacgtgtctgatacttctctcttttctagtcattttactttaggataagaatttaccacataatatcctttcttatataaaattattttattttcttcatatccttaccaaaaatacatcttcatagccaaaacttgttttattactctctcccctacctattagtttctttttatctttcttcataaataacttttaaacaactttcaaattacataaaattattttttctctcaataacacaatttacagaattatatattaattagaattcctattcttagtaaccttaaattttagtgaaaacccaggaagcaagaaatcttgaactatcagatgttattttgtaaatgaaacaattccataatttttagaaacacattttcccatagcacagtcttttctgaattggaaatgacccagacatctgtgggcagcaagccatccaggtgccgagacaagagaccaagggcacgagctattccagtataataaaatatataaaacaacaagagttatactagatctagatcacagacatgattatatatgaatatcattaatcattagtttgtagcaattgctctttattccaatattataataatccttgctctataatcataacctaggaaaaaccaggccatacagagatgggggctgaggggacatggtgagaagtgaccagaagacgatagtgcgagccttctgttatgcccggacagggtcaccagagggctccttggtctagcggtaacaccagcgtctgggaagatgcccgttgccaggcagaccgtggtctagcagtagcatcagtgtcaaggaaaaacacctgctacttaggagtctccctttccctgggggagtttagagaagactctgctcctccacctcttgtggagggcctgacatcagttaggctcgcccgcagttatccggaggcctaaccgtctccctgtgatgctgtgcttcagtggtcacgctcctagtccgccttcatgttccatcctgcacacctggctttgccttttagataacagtagcaaattagtgaaagtactaaaagtctatgataagcagaaataatggcgtaagctgtctctctctctctctccccctctctctctgcctcggctgccaggcaggaaagggccccctgtccagtggacatgtgacccacgtgaccttacctatcattggagatgactcacactctttaccctgtcccttttggtttgtatccaataaataacagtgcagccagg

SEQ ID NO: 97111 - DNA, 14464 bp, Homo sapiens
  misc_feature (1)...(14464): n = A,T,C or G
gcagcagaatttgagaggaccgactccaattttgaaagaagttctactgtgggtgaaatgttatcaaacagcatcacatgctacagagtctttcatggaaggaagagtcagttgatgcagcaaacttcattgttgtcttgttttaagaaattgccacagccaccccaactctcagcaataccaccctgatcagtcagcagctgtttacattgaggcaagaccctccaccagcaaaacgattgcgactcactgaaggctcagatgatcgttaatatttctgagcaataaaacattttaaaattaaggtacatacattgttttttagacataatgctgttatgcacttaatagactacagtatagggtaaacctaagttttgtctgggtagagtgactcacacctgtaatcccagcactttgggaggtcagggtgggttgactgtttgagcccagcagttcaagaccagcctgggcaacatggcaaaacccatctttacaacgattacaaacattacctgggcatggtggcgcatgcctgtcgtcccagctactgggaaggctgaggtagaaggatcaattgagccccaagaggtcaatgctgcagtgagccatgattgtgccactgcagtccattctgggtgacagagtgaaatcctgtcccaaaataaaaaaaatcacatagctttttttttttttgagatggagtctcactctgtcactcaggctggagtgcagtggtgcaatcttggctaactgcaacctccacctcctgggttcaagcgattccctgcttcagcctcccaggtagctgggatcacaggtgcacccgccaccatgcccagccaatttttgtatttttaatagaaatggggtttcactgtgttggccaggatggtcttgaactcctgacctcaggccatccacctgccttggcctaccaaagtgctgggattacaggcgtgagccaccacaaatcacgtaacttttatatgtactgagaaaacaagcgtgagccaaaaatcatgtaacttttatatgcactgagaaaccaaataatttgtgtgatttgctttattgtgatgttagtccattgaggtggtttgaaaccgaacttgccatatctccaagatacgcttgtattcaagaaccatttgttgaaaagactattctttttctatcgaatcatctttgtacctttttccataacttagtgaccttatctatgtgagtctctttctggattatgtattctttttttcgatcttggattcaatttgctaatatctcgttgcgcatttttgtgtctgtgctcaggctgttattggtctgtagtttcttagtacggtctttggttctagtatcaggggatgctggcctcatagaatgggttgagtgctctctctcttcagtgttttgaaagatactgtgtagaatcagcagcatttcttccttaaatgtttagtaaattccccagggaagcctgtcctcaccgatggaaaactgctaatgtagagaagtcagctgaggcgtctaaagggactaaggaagggaggaaaggacaccaggaaactgtagcctaaggtccagagggttctggtccagacagagcagcagggaggccccgggagctccttcccgatgtgggctgtggtctctgcaggtgctgtccctggacaccaacatcacaaaccaggtgaataagctgaaccgagacctgcttcgcctggtggatgtcggcgagttctccgaggaggcccagttccgagacccctgccgctcctacgtgcttcctgaggtcatctgccgcagctgtaacttctgccgcgacctggacctgtgtaaagactcttccttctcagaggtgcggctgagctccagcgggcccttcactgtggagcagaacatccgagggcactgcggtgtcttgagggcttctgcagctccagctctgtgggtcacacctgctgcccctctgactcacatggattggcaacaggccccttcccaggcctccccacaccatgttcggaatgttgtcctaggaagggctcaagtgcaggtgggaggccagagtgcgtgcagctgcactcaggagactcgcccgtcaccaggcgcttctcacagccccttcctctcctgagatcctgcccatggcactgtggtctggaggctgggctggtgacctctcgcactcttgctctgcctaggatggggcggtcctgcctcagtggctctgctccaactgtcaggcgccctacgactcctctgccatcgagatgacgctggtggaagttctacagaagaagctgatggccttcaccctgcaggacctggtgagtcgtgcatgctgcctgcccgtgtgccctggagtccacaggggggtttctgtgcactcccgggagccggggtgtgtgcaggtcctgaggcacgccctggtgtcttccaaggggcctgccctgcagaccagtccatgccctgagcctgatggactgttctgtccacactggttgagcacctgccttgggtcaagagctggccttgtgggtgcttcgttctagcagaaggaggcagacactcccaagtgtgaagagaaggaaaggaggaagagggagttgcgcagctcggccacaggaaggtcttgccgaggggcatctgagcagaggctgggggacgcgccaagctgccgtgtggtggtgcacggcgttcaggcctgcaggatggagggagtgagcagggcctggaggaggcctcaggactgggcatctggggtggaacatccacagcgagggtgggtgtagggaaggcgctggcaccgtgggatgaggtcgtgcattttactcataaccgagggctggctgcacacagcaggggctcgaggcttactgatgggcccacgaatgtgtctcgcgagcctgtgaagaagcagcaggcaggtctggccagcgcgggagggctggcgcccatcggggctgctccctttcaggtctgcctgaagtgccgcggggtgaaggagaccagcatgcctgtgtactgcagctgcgcgggagacttcgccctcaccatccacacccaggtgggctctccctcatctgcctcggctcagcctggcctccttggcctcctctctgagtggactggggtctcactgtgcctgtttattcctgcaggtcttcatggaacagatcggaatattccggaacattgcccagcactacggcatgtcgtacctcctggagaccctggagtggctgctgcagaagaacccacagctgggccattagccagccccgggccccgggtgcctctgcgtccgtgccaggcctcctgatgccaaggccacatccccgtgcttccagtgaccagaccactgaccaccctgactgtccaaacctgtgaccccaggccagggaacggggaggaaaccaaagaaaaccattttcagggagctcagacgtcacaggagggagcgggagcaggatgtggccctggcctcgccagagcacctgaagaagcaggccgtgagcgaggctgcgagtgccctgggcgccgtttctcacgcagtgaatgcttttccaggcctctgttgcttcctgcaccacacctggtggggtgggagcgtcctctaggtgcccctagttctttgtcctgcctcccagagggaggaaaagcccctgggggcttctggctccctgagattgggctctgagacgagacgggttcccaaggccctggtggggctggagtctcacctgtttgcatggagaaatgggctggccccacagcctcacaggagcagtttgtgggctggtttccccgggaatccagaccctaacccgtgagaatctggattttggcttgtgagccctgcttatttggagccgggtctagagggaaccctctatcagcctcaggaaaacaagacctctgtgcacctcacttttggctcactgcagcccttgtccttcacctccacacaggaccagctggaagcagaaagaagaaaggccaatttcacagggcaccaaacaagtatgaaatgtaaatcagaaatgcagacaccccagacgagagcctcacaggagggagggggccccacaggctccccaggaggctcgtgtctttggcccagagccagccttagtttgtccctgccatctactgtctgaggccatcgctgctacactttgtttttatttgtatttcatactgaagtttctctaggttgtcactgtgtatttgtgcagagcgcctcagatcggggactgggtaccactgggcacgtgtttggcccctggatgctgctggggccgcctgcctggagaaacctgatgcctgctcagatggaggagtgctgaggcctccagagtggagatcaaatcaaattagggcaagcaggggaggagggaggctggctgactaggcttcattcctggaagcgaatctggagaaccctcaggaatgaggagtgatggggccgggggacagccgctcgtcccccaggaaggccacctagcaggaccaggggtcgcccggtgcagccgtgggcgccagtcagcctgggttcactgtgaggctagctgcgggcatttgagtagtggtggaggggtcagaaacgggaagctctggccctggttcccaagcagcggctcaaccagaagagccagtttctccaaaaatgagctggatatttgtgagccacacagcatgtgcaggccgtggggtgacctgaggccgatgcccgaggctgggaggccacagtcaagggaaatggggcccatggaagacatgttctcgccacctgaacacagcgctgggatgaggactctggagttgtgctgagacctccaaactcaggctttagggtcagaccagggtcgtcttacccgcccttctccgctctttgacctttgggcgtggtgttgctctcctgagactgggtttcccttcagaggcaggatgtcatctgtcactggcacaggtgacatcatgacgctgttctgggctcctccccccacccagtgggcaccagtctaaccactgcagcatctgaggatgcagtaaccagattacccccaggccctgatgcagttagtgctggctcccgggctggtgtccttccacccccgcctggcctgacttcccatctcggcattcctgccccctcccatggagtaggaatgaacactggtctgagcactgctgtagtctgagctttcgttttccttgtgtgcagctgtcccggcctccctcctatttctctcttcctgagtcatgctgtcctcccacattttgagatgagccagctttggtttggagtctggggtggccctgtcagaagcaagtgcactgaggaggtggcctgggtcccagtgcactcccagcctgggcagacctgaccgtggcctggctggctgtggggaccatgtgtcatggggcaggcagacatgtgccctgcacacctcgcaggctgcttagaggggagatgacccagacagaggtcaccgtgcagcccagctccaggccgacagggcctgacatcccatattgacaggctcacgatgctcctccccaaggaacgaggccagaaggttctgctcacaggtttattggactgagtatgttgtgacttctaagggaagagtctgggcagattcgaggttacaacgcctgtggggtggggtggggtggggttcccaagggcccaagaccgggagcagagcccctcagagctcagctggcttgggttccaggtggctgtgagaggtgatgggaagtgagcagccctgtagggaccagctggggaggaggtgtcaggggctgtatgccagggtggggcacaagcctggggccagagcgtgcccccagcccttgcacagggatcctgtggtgccccgtttcgtggagatgctccgctactgaggtgcccacgtccacgtgcaggtccctagctggggactctctggccccaccaggccgggtctgcagtccagtgagatggaaaggagctcagagttgagccaaacctttggggtctgtgggtgtggaggcttgggcaggctcggaggcaggagtgtccaccatctgctcagaaggggcagagatggggcaaggccgcaggggcgggaaggctgggccacactctgccccttgttggccctcctggcctgatggagggctggggtgctggtcctcggagcggtggccgggttcgggaggggcctggcccaatacacgggcaagggtcacaggccagctacctgaggggtggctcggcgtacacaccttgtcaaatttcttatggctgtagaccttgtttttgttcatgaatgttagcaagatccagtcgcacaggaaggagccctggggccagcagagaccggtgtgtaagggcctggtggaccccccgcacccgctgggaccccagagagggttccttaccaccccgacggaagtcagagctgtggccagattaataatggtgggaatcaggctgaacttccccggcctggggagaatgggggtcgtggtcagaatgtctgacggcrtctgatggggcttaagggaggggtggggcgtgaggagctcagacccaggctagcagggctggccacccacccccagcaggtgcaggcacctgtccatgcacaatgacgtcaatgcggatcccgtaggccttgatgagcgtgcgggtggtggtgccattgatcttgtagtatttggcaaacctgcaatgggaacgccagtgcccactcgtcctctgcactccagggctgccccacaggcattgggcctctcgggaccccaccacagctatgccagtgtggacagcggtgtcccaagtacagcacctgaagttgtagcctgacgaggcaggcacgtgcttggggtcaagcctccggaaggagtacttggggttgcactccgatgcaggcaggtccaggtcacagtcccagttgataatgaccccgatgacaccaccctgccaagaaggagccagagaagggggtcaggagggcacacgagaggcccctcgagagcccgggtcagtcccaggctgcatgtgaggtgtgcactgaggggcccatggggcagctcaggggtactggtgggcgtccagtgtctgaggcacaaggggtgccagcagccagccccatggccagtgtcaataattcagcaagcgccacaccggatgggttgcgctgatcgcatttctttcctctgcctgagcggggccagctggtcaggagggaggagggactggtcccctgtaccccaggccctctctgtgcaggtgggagcccaccctggccccaccctgcctgcgcttgccctgccttgtgtgcgagctctgtgaagctctccccagccttctccacgataaagcccagcttgaagatggggcagtagaggtcggaggcctcgtggaacgtgcagcgcttcaggtacccgtctgtgcggtcggcgatgttgcccctgaggaggcggtaggaggcgagacctgcaccccaaataccccattcccagaaggcagccctcaggctgggccgtcaccacaccccgcggctcttacttggagaagtggaatttggggtagtggatgctgttcttgatgaggatggtgaaatttggggccatcgtacccagaaattggctgaggaggcacagaagggttgtttagtcccctcttcccgcaaagcccccgcctggcattggcccccacccctccccagctcttgtcactcctgccccgcccgtttggcctctggtcagrggaaaaggatcagaggggaggctgggccccaggccggggcgcaggtgcacctgacagaggccccatcttccaccgggcaccagccgaacacctcgcaggtcttggagggcccctggtaatagggcacacagcgcccrgtcctcaggcctgggaggcagaggtcactgaggcattagcggggacgcagccctgccccacccgcccagccccagctggcgcacaccgaccgtttcccagcatgtccagctccccagccacgcagtcggcgtcggagaggcaggtggcgttgtggacccttatgctctagggtggaggcggcccagtcagggaccccgcaagggacagctggcccgcctagctgaggcggggtcccccagcgccgcgggatcccctcacctcggggcaggttccctgggtctgggagtgggtggcctcgaccctggtgatgatgctgaacacgctgcccccctgggctcagaaagagggggcggtcggccaggcggcagccgctgccccctccgcccactagggtagggtgcacggcggggcggggggcagggggcggcccgcacctcggggggcttcacgtactcctccacgtcccacactttgtgctcggacgtggtgatccccttgaccttggtgatgatggagctctcggggcccgtctcgctctcctggtagcttttctgnnnnnnnnnnnnnnnnnnnnnnnnnnnnnnnnnnnnnnnnnnnnnnnnnnnnnnnnnnnnnnnnnnnnnnnnnnnnnnnnnnnnnnnnnnnnnnnnnnnnnnnnnnnnnnnnnnnnnnnnnnnnnnnnnnnnnnnnnnnnnnnnnnnnnnnnnnnnnnnnnnnnnnnnnnnnnnnnnnnnnnnnnnnnnnnnnnnnnnnnnnnnnnnnnnnnnnnnnnnnnnnnnnnnnnnnnnnnnnnnnnnnnnnnnnnnnnnnnnnnnnnnnnnnnnnnnnnnnnnnnnnnnnnnnnnnnnnnnnnnnnnnnnnnnnnnnnnnnnnnnnnnnnnnnnnnnnnnnnnnnnnnnnnnnnnnnnnnnnnnnnnnnnnnnnnnnnnnnnnnnnnnnnnnnnnnnnnnnnnnnnnnnnnnnnnnnnnnnnnnnnnnnnnnnnnnnnnnnnnnnnnnnnnnnnnnnnnnnnnnnnnnnnnnnnnnnnnnnnnnnnnnnnnnnnnnnnnnnnnnnnnnnnnnnnnnnnnnnnnnnnnnnnnnnnnnnnnnnnnnnnnnnnnnnnnnnnnnnnnnnnnnnnnnnnnnnnnnnnnnnnnnnnnnnnnnnnnnnnnnnnnnnnnnnnnnnnnnnnnnnnnnnnnnnnnnnnnnnnnnnnnnnnnnnnnnnnnnnnnnnnnnnnnnnnnnnnnnnnnnnnnnnnnnnnnnnnnnnnnnnnnnnnnnnnnnnnnnnnnnnnnnnnnnnnnnnnnnnnnnnnnnnnnnnnnnnnnnnnnnnnnnnnnnnnnnnnnnnnnnnnnnnnnnnngtggggctgggagcggggcctcgcggggacagagccgggggcgcggcagcccagccccagctcttggtccaggtgtgggccgagcgcggaaccggcggtctcgaagttggagggtcgggattccccgggtgggaactttttccgagctcgaggagaaagacatgggaagtcccgccggcctccgcggcgccccccaccccgtccaggccggttcctgccgcggctgccggggcttcgagcgcaacctgcactcccgcctttgccagcagacgcctcgcttccagctcctgcctccgccgcagctccagccctcgagctggagagggatccacggccgatccgttttcttctttgcaagccagagttttctttctttctttctttctttctttctttctttctttctttctttctttctttctttcttttttttttggtaacttttcgaacctccaccccacccacattattttgaagcaaatcccaagcatcacagtttttcacaaaataattttaaaatagttattatgataaaatcagcatagcatgtaattaactattttaaagtaaacaattcagtgacattcacaacattgtgcaaccaccaccgcctctgtttcgtccccaaacactttccccaccccaaaataaaactcccatccattaagcagtcacgacccgttccacactcctcccatgccctggcaaccactggtcgcttttctgtctcagtgaatggacttgcctgttctggatatttcatatcaaggaaatgcaatatttgtttctgggttaatgccttttctgtctggcttcattcactgagcatgttttcaaggttcatccacattgtagcatgtgtcagggcatcaccccttcttatggccaggagaaatgtctaggctatccaaagaaggaatttagattgctttcaaactaactctgtgaatagtgctgttataaacactggtgcataagtatttgtttgaactgttaaattaactcaattaacaggctgcctctgtgccttgagtttctaggtaacaacaaactgcaacctaatgtaccacagaaacaagctaaaagcttaacctatgagtatattttggaacaaatagctgggtctcagccagtcacaggctgctaactgatctgatcatgccatataaggcaaacatttcaagcagtaacaaaatcaagctaattgtgattttttttttttgtatctcacttctgtgttctatctataaaaacttcctgcccacattacagagtggagctctcgaacctcccccattggttctgagtgctgcccaattcatgagttgtgttttgctcaattaaactctgttggctgggcacagtggctcatacctgtaatcccagcactttgggaggccaacatgggtggatcacttgagatcaggggttcgagaccagcctggccaacatggcgaaacctcgtctccactaaaaacacaaaagttagccaggtgttgtggcatctgtaatctcagctactcgggaggctgaggcaggagaatcactggaatctgggaggtggaggttgcagtgaactgagattgcaccactgcactccagcctgcatgacagagggagactctgtcacacacacacacacacacacacacacacacacacacacaaactcttaaatttaatttgtccaaagtttttgttttaacagtttggtgtcagaagtgggatctgaagtagacctccagccaccccctaggagcactgaatgctcagtagggcctgtgtgcctgctgatctctcaaagcatctagagtcataggtgagttctctctgctggatttgtgctctatgaccatgtgttttgagccctctactttgagcaattcttttttttttttgagatggagtctcactctgttgcccaggctggagtgcggtggcgtgatctcagctcactgcaacctccgcctcccagattcaagcaattatcctgtctcagcctcccaagtagctgggattacaggcacatgccaccgcgcccggctaatttttttgtattttagtggagacggggtttcactgtgttgcctgggctggtctcaaactcctgagctcaggcaatccacctgccttggcctcccaaagtgctgggattacaggcatgagccacggcgcccggccttgagcaattcttagaccggaatgggtccaggattgaattggatccaaaacttaactctattgtatccagttagaggccttgagtaggtcccttttggcttgggtttgtctgaatccaaggagtctgcgtgccgccttctgggacgtttgctaattatgtgtgtaagaactatggacccagaacttgtgcacattttagaaaaatcggctaaccccaaactcaaaaagacccctccagattcttggaaccgtacacctttcggagaccttaaggtgaagctaaccagggaagttttccccagaagcagacgggatcctaaatgtggacagcttttccaagatcatgggttgagacttctctgccatcatgacagccttagcctccccctggccccttatttcctgctgtctgaatcttttccttttcattacaggaaaatccacagcaccataatgtgtggatggcgtcagctaaggcttacgctctaggaaaaacccagagtggtagttgggtttgtgggttaatgtcaaaagccaggaaactacatcaatccctgtcatttttcacgatgacggtcaccctggaactcccaggggagagtggagagcgtccccatgtgtcccaggggagactggagagtgtccccatgtgtcccagggaagagtggagagagtcctcgtgtgtcccagggaagactagagagcgtccccgtgtgtcccgggggagagtggacagcccatatgtcccaggggagagtatccccgtgtgtcccagggaagagtggagagcgtccccgtgtgtcccgggagagaatggacagtgtccccgtgtgtcccaggggagagtggacagtgtccccctgtgtcccgggggagagtggggagcgtccccatgtgtcccagggaagagtgttcccgtccctgtgtcccaggggagagtggagagcattcccgtgtcccaggggagagtggggagtgtccccgtccctgtgtccctaggaagagtggacaaacacactctcctttatgttccagacaccgctgctatcactttcatatacccgctgaaacggtgttctgacctttccaattaataatccaaacactgctcatatgtaaagcgtgcctgaacgatgccttcagaaggtagatgaggctccaggcatcacatactcaagacctgggagttctctctgtgggtgggagacacggcatgtgtgatgtcactggattgagtccagtgaggtccctttccattaactgtggttacacaccctcacagcacactgtaaagggaaaagcttcataccggagcttttccgctggacctgcttcgggagctgtactgacatgtgggtgaaaacgtgtcactgacttctgctcagatgccaccaggtggcgcccttttccagcccccgagagcttctgctgggtctgtggagaatccgctgttgggcctcctcactggtttgaatcttgcaatttggtccggctcagtcctgccttccaagtagcttcccctgacagttcccacccaggatacctcccataatcggaggccaaagcagtcaacaaccaaaattagcaccagccttgaaataaatgaagttagttttcactgaagaaagtttccattagaattcttggtggtggtgaggtgctggttgtgtggaattctaacctaattagtaaattggggaacatcttgggctttgtggccaacccgacctcccaggattttttttccccccagaactccatgagttcactcccagggatttagacgggtggaagtcacgctctgaaaggtggattactagaaatcacacagctttaggtctgttaaaggatatctgcaaaacaacaaacaaacaaaaaaaaacccagttaacaactttcttcctaaaaattattttttattgtaataaaacatttaacatgagacccacccttttaacaacattttaattgaacaatacagtattgttaactacaggtgtgatgttgtatagcagacctggaacatactcattttgcataactgaaactgaaactttatccctgttcaggagcaattcccttttaccctctctgcagcctctggcaaccaccattctactctccacttctatgagtttgacaacataattttttttcataattttttttgagataggatctcactctgttgcccaggctggagtgcagtggtgcaatcctagctcactgcagccttgacctccgggctcaagtgaccctcccacctcagcctcctgagtagttgggaccacaggcacgtgccaccacgctaggctactttttccattttctgtagagacagggtctcactgggttacccatcagcctggtctcgaactcctgggctcaactgatcttgccttggcctccaaaagttctggaattataggcacgagccactgtgctcaagtgacaacataattcttttttttttttttgagatagtatttgactctgtcacccaggctggagtgtggtggtacgatcttggctcactgcaacctccacctcctgggttcaagcgatactcttgcctcagcctcctgagtagctgagactccaggtgtaagacaccatgcctggctaattttttatttattttttggtagagatggggtctccctatgttacccacgctggtctcgaactcctgggctcaagcgatcctcccaccttgctctcccaaagtgctgggattacaggtgtgagccactgtgcccggttgacataattttttttttttgagacagagtttctctcttgttgcccagggtggagtaaaatggtgtgatctcggcccaccgcaacctgcacctcccaggttcaagctattctcctgcctcagccccccgagtagctgggattacaggcatgcaccactatgcctggctaattttgtatttttagtagagacagggtttctccatgttggtcaggctggtctcaaactccagacctcaggtgatccacccccttcggcctcccaaagtg

SEQ ID NO: 97112 - DNA, 18628 bp, Homo sapiens
gatgggtgttagaattttatttatatagatttagcataagttataagtatggatttcttaagttcatgctgaaatgtgatagaactgggcatgaacaaatttgttaattctgtacaattctccttcttaccatttcaaaacttgcatgaatgaaataagctctttgattttgagggatttaaaaatggatttaattagaaaggatttatttagaaagaagtttttaaagactgtaggtgtttcatgttatttaaaccaccggagtaacaaactacacaaagctactttttagtttctaaatttacatgcttgcccctaaaagggaagaataattgagacaggaagaatagggggtattaagagtaaatataaactgatttttcagtgctccctttcttttgcaggtaaaaacaaatggaatctctgatggcaaaagagaatcaccattaaagattgacccatttgaagatctgtcatttaatctgcttgctgtatcaaaggctcagctatctgttcaaacgtcacctgttcccaccccagacccaaagaggttgattcagttgccttctgcaacgcaaagtaatgttttgagttctgtaagttgcatgccaacaatgcctccaattccagctcggagtcaatcccaggaaaatatgcgaagttctccaaacccatttattactggcttgaccaggacaaatcctttcagtgacaggactgctgctcctggaaacccatttagagccaagtctgaagaatcagaggcaacttcatggttctccaaagaagagcccgttactatcagtcctttcccttctctgcagcctcttggtcataacaaaagcagggcttcatcttcacttgatggctttaaggacagttttgatctacagggccagtctacattaaaaattagcaacccgaaaggatgggtaaccttcgaggaagaagaggattttggtgtgaaagggaagtcaaagtcagcttgttcagacttactgggtaatcagccaagttcattttctggctccaacctgacattgaatgatgactggaataaaggtacaaatgtctccttctgtgtgttgccgtcaagaagacctcctccacctcctgtccctctgctcccgcccggcaccagccctccagtagatcctttcacgaccttggcctctaaggcttcacccacactggactttacagaaagataacgccatgcaatagaaaacagtgggtacttgcttttggcaggatagagctaagagaattgggcattagtatttcattatgtgcaataagtcattgtaagtgcactgatatcttcacaaaacaccactatttgatgtgtacagagttggactatgtgtatattggaaataaggaaaaacccttctcattgttaactggagttttgatgtatttctctttggatgaataggagacagtagtagccataaaaagtacttatactttagaaaacagtccttattcagaaacttttcggtcagtcttctgaagaatctcaaaaagcccacccaactttcagctgacatttccaccagccctctcatacttgttaacaattggtatctttgagtatttaccaaagagctgccaaggttacagtgaacagagttttgaaaggcattgctttaaaggaaaaaagtataggtatgtgtacatatataatacatacaaacacatgtacttctgtatacatttacatatttttacaattcatactttaatttctaggctataactcagaccaaattatacctaaaagttccaacaaagtccctttttcaatatcacattaccaaaaagatggctgcaaatgtaatttggacctttcattaattttgttttcaaaactagaataatctcaccacagaatcagaattttctaccgttccacacccaaccccttcaaatacacacaaccttgttacttttcactccagcaccttcatacgcttttctccaggaggaggttcttgcagctggaaacagcctattttgtggtcactgtcaagtggatggatattctagcgctcccaaaaaagcactatggccttatatgcagggaaggcacataccaccaagttcaatgagaaatattagagctaaccgtactctcttctctgcgtacgttcgagtatacgttgcccatatccctcccatattttctttttgctgcttttgctctggaactttgcttttagcagggaaagcagctgtcccctgagtgctttgaattgggaatatacccagtgtgtgttctcccccctcttacgaggctacataacacatctatgatgctgctttaagtttttagaggctatacctcaaagtagctgcggattttgtctcctgcactgccaatatgcaactgatcccgcttttattaattttttgaagaagtacacagaatttttacagaatgtagtattttgatatcattaagtaaaccaatcagaaaactccttgagcaatagttgtttctttgtcagtttcagttacaatcatctttacccattaagacttacattaacattccttttatataaagagttgtatatgtccacctaaattcctatgtccacacttaacctttaaagatgtacattgagggaatatcaaaaaatagcgttcatggctacgaatatgtagaatgttaaaagcacagcaaactgcactgcacttataaagcaaatctattagaaaaaaagcatttttctaaatgctcaaatgttatcaaaatactatatttatagaagtaatcttctctgttaacagccaagatttgctgttagaaataactcttgtgagttttatattgtgctttttggaggttctaatcatttcagcagtagcgtcttaaacagcagtattactataagcagttgcttcaaaatgtgaattaacttgttgaaactgtggctttaacatccatgtgactagtgtatatggtatttgctctccattagcaaaataattcattgttaggtaaacttcactagtgcaaattgcagatctgtgagcaatgtttcctattgaatataaactactgtctaaaatatacatatcagcagcccagcctttatcaggaaaattatacttggcaagttgctgaaaatgcacaaagttatgaaagttaaaggtatgctgcaaataactagccattattctatgtattattaaatatttactagttctgttaaaagcagagcagaagttagacactaaggatctctttgtgaactctgtgttctctatattagattgctgtttatatgtaagaattttattgcttatgtggcatacaatatttataactataaactttatagaagtacagtattaaagtcagtggtacacagacattctgtacatatcctgtgaaacgtgctgtcatatgaaataaatatatctgtctttaccatgctgacttctttgttagaaagggaagaatttttctcagccattttccttgtactttacatacacaagtttggtgacgttcaaacaaaataagcttaacccttattgccgaatcagatattttaattcaagaccttattttcatttctccagatagtgcttcctctaaaactaagaagattttccgagattactaatcattattaaaaagtccatgcccagcctggcccacatggtgaaaccccatctctactaaaaatatgaaaaaaaaattagttgggcgtggtggtgcaggcctgtaatcccagctactggggaggctgaggcaggagaatcactagaacctgggagggagaggttgcagtgagccgagattgtgccattgcactccagcctgggcgagaagagcgaaactctgtttcaaaaaaaaaaaaaagtccatgcacttattccataagagaggccctcacgcaaaaacatgctgacttgaaaataatacaagaaatatgaatgatttttcttacccaaagtagaaggaacaagtggggggcaaagaggaattgggacaaaaatagccaatcagaaaaagggactgcctaaagagacccaaattaaaaggccagggccgggcgtggtggctcacgcctgtaatcccagcgctttgggaggccgagatgggtggatcatgaggtcaggagttcgagaccagcctgaccaacatggtgaaaccctgtctctactaaaaatacaaaaattagacgggcgtggtggcaggcgtctgtaatcccaactactcaggaggctgaggcaggagaatagcttgaatttgggaggcagaggttgcagtgagccgagatcacgccattgcacttcatcctgggggacagagcaagactgtctcaaaaaaaagaaaaagaggccaaggctaggcaaggtgcaatggctcatgcctatactcccagcattttgggaggctaaggcaggaggattgattgagcccaggagttcgacactagcctggacaacatagactttatctctggtaaaaatcaaaaaaattagctgggcatggtggtgcgtccctgtagtcccagctactcagaagtttgaggtggggcatcacttgagcccaggagatcgaggctgcagtgagtgagctatgatcacacaaccacactccagcctgggcatcggaccaagaccctatctcaccaaaaaaaaaaaaaaaaaaaaaaaagccaaggctagtattgccttttttcagacctgtctgattgatatttgaaattcttactttaattcttaatgttcattaaccttttattaagaagttacagaattattggcttacaaaaaccattttaagatacttgtaggttaatatggagttataagaaataatacagagaccccgtgtacccctttacccacttgcccccatgggtaacagcttgcaaaactacagtaccagagcatgaccgagacatgaacaatacagagcatttccatcaccataaggagccctcatgttgcccttttcccactgccctttcatcccatctccttttcccctgcccttaacctctggcaaccactaatctgatctccgcatgtataattttctcacttcaagaatgttacataaattgaatcatggtatgtaaccttttggggttggcttttttcactcagcataattctctggagattcatctagtttgcatgtactctgttcctttttattgctgaatagtattccatggtatggatgtaccaccgtttatttaaccattcatccactgaaggacacttgggttgtttccagtttggtggctattacaaataaagctgctatgaagataagttttcatgtctctgggataaatgcccaggagtgcaattgcttggttatgtggtaatggcatgcttcagttttttaaaaactgaaactcttccggagtgcctacccttttacattcccatcagcaatgcatgagtaatccagcttctccacatccttttcctcatttggtggtgtcactattttttattttagccattatagtagtggatgtttcattgtagtttcaatttgcatttccctaacagctaatgataaaaatcttttgtttttgttttgttttctgagacagagtcttgctctgtcaaccaggctggagtacagtggcacaatcttggttcactgcaacctccgcctccagggttccgacgattctcctgcctcagtctcccaagtagtggagcttataggcgcctgccaccatgcccagctaactttttgtgtttttaatagagatgggtttcaccattttggccaggctggtctcgaactcctgaccttaggtgatccacccacctcggcctcccaaagtgttgggattataggcgtgagctactgtgcccagcctgaagatcttttcaagtgcttatttgccatcttatattcagtgaagtgtctgtggtattttacccatcatctaaatggattttgtttttacagttgagggctatgtacatattccagattctactcatctttcattggatatrtggtttgcagatacttctscagtctgtagcttagtcttcatcgtttttacatgacccacagccagattctgagctctgcaggaccagaaactatagcaagggtgataggcatgtaataarcaaactcacaagaaactgatgtataaattaaaacaccaatttattaatgttagaaaaatgtctgacygtatcaaggattaccaattatatggagagrggggaactcttaacatggttggtgaaagggtaaactggcacatcagctcaagaaaacaatttaacaatgttaggtaaaattcatataccctatcaataagaaatccgacttctagagaaactaggacctgtggagcatgagaggcattgtttgtaatggtgaaaaccacaaataaacatcaacaggggagtggagtggcatagtcatacagtggaatcgtagacagcagtgaaaataagtgagtgaaaagaacataygagaaaacctcacggtgtagccataaagcaagatacaaaatagtaagacaccatttatataacatttaaaaggccaggcgcggtggctyatgcctgtaatcctagtactttgggaggccaaggcgggcggatcacgaggtcaggagttcgaggccaacatagtgaaactccatctctactaaaaatacaaaaaaatcagctgggcttggtggcgggcgcctgtaatgccagccacttgggaagctgaggcaaggagaatcgcttgaacctgagaggcggaggttgcagtgagccgaggtygcaccactgcactccagcctgggygacagtgtgagactccrtctcaataaataaataaataaaataaaaaaatttaaaatacacgaggatatatttttaggggtacatacacgttaatggtataaaaaacatgcaatggaaatgataaacaccaaatttagaatagcaatttacctctggagaagaagamgagaatgggattagaaagaggtatgtgggggctttaactgtatctgtagtgtattaggacaaaaaaaaagyagtcaatagagttaaattttctctttttctttctggctgcctgacatccagcagccatcatgaatgactcataaattatccagaccaggacgttaatcactgatgaattgcttaacagatacaaatggtcataagatgctcttcatcctagaacagaaacagcacctaaaacactaagagaaaaccagccaaaactcacaagaccacacaccaggtgtcatcttggtcttcagattcagaagtcacttgggtgcctgagggcaagacaacaggctttgcatgatttatgattgctgaaaccacaccaagaaagagctaaccacagatatttaagacaagacctgtatgagaagaaaaggaccttaagaaaatgctgaacagggccaggtggtggctcacgcctataattccagcactttgggaggctgaagcgggcggatcacctgaggtmacgagaccagcctggccaacatggcaaaaccccgtctctactaaaaatacaaaaattagctgggcgtggtggcaggcgcctgtaatcccagctactcaggaagctgaggcaggagaattgcttgaacccaggaggcagcagttgcaatgagccactgcattccagcctgggcgacaagagtgagactctgtctcaaaaaaagagaaaaaagaaaaaaaagaaaatgctgaacagaatgcagttataataaagtcatgaggacaacgaataccagggctgacaaatttaaagatactgcacaggcttgatctgtggtgattttaataatcactagatgattactaacctacatatttaaacaaaactggatggtcagtacatgggttcttatgcaacgattttctacatttctcaatattattaaaaattatattgagaccctgtaaaatatgtaagtttgtggacatgtasctctctatctggaaggctatactgtaaaattttaagaagttgatgggtacagaattggattcaagagaaagggcatgaccttatggcgggcagtcaggagctaagaaaacatagtagcccatttctccttccggcgagatagacatttgccaatcagaccagtactgcctgttccagcgtttgggtgatccctgtctcaacagtacwagaaataataacacatcttccccctaaggctccatcccccttctatccactatcagttrtcagtcttcctatgaagccgggattggctttgggcatttccaggccttcagtcatacactttctccccacaggcccccttccccaatacacactccccagtgatattattcggaatatccacaagagatgttatttttgatgtcacagacggggtccaccctttgatattttttgtcatatcttagggagatattacttcaaatatcacagtgggtgtacacccactgtgatgttattcgcaataccctagggagacataacttttaataccacagtaggtgtacacactatttgtgtatatctgctgtgatattatccctaatatcctaaaaataaatagaactcctaatatcacagttggtgtacacactgtgatattattcataatattccagcgggatgttactcctcaggtcacagggggttaataccctgggacagtattcctcatattccagggcggtgatactcctgaagtcacagggtgtgtaccccctgcaatattattcatcatattctagggggatgttactcctaatgtcacagggatgtaccccctgtgatattattcatagtatatgagagggatattattactaatgtcacaatgcgtgtacaccttgtgatattatttgtaatatcctaatgtcacagggggtgtgttccctgtgatattattcctaatatcctagacggatgttgcttctaacatcacagggtgtgtacaccttgtcatatcattcataatatcctaaaactacgttattcctcatgtcacagagggtgttcaccctgtgatattattcgtaatagttttgtgggatgttactcccaatgtcacatggggtgtacacagagtcacacagtgatatgacttgtaatattctatagaaatgttactcgtgaatcacaggggctgtacctcctgtgatattattcgtaatattctaggggaatgttactacaattgtgacacgtggtgtacaccctgtgatattactcgtcatatcatagcgggctgttactactaatgtcacaatgcgtgtacaccctctgatattattcgttatatcctcgggggatgttactcctaatgtcacatggggtgtactccctgtgatattcttgttaatatcctagggggatgttacttttaatgtcacygggggtgtatatcatgcgtattcaacgcctgtgatactattcctaataccctaggggcatgttcctcctaatgtcacayggggtgtacaccatgtgtgttcacctgctgtgatattattcgtaatatcctaggggaatgttacccctgatggcacaggaggtgtacaccatgtgtgtaaaccgcccgtgtcattattcgtaatatcctagggggttgtttcttttaatgtcacaaagggtgcacaaaatrtcacagaaggtgtacaccttgtgacgttawctgtaataccctagaaggrtgttactcctaatatgtcacaggggtgtacacactttgatattatttgtaatctcatagagagatattacttcaaatatyacagtggatgtacacacatagtrtataccctgtgataktattcataatatcmcagggagatacaactcctgatatcacagtaagtttaccccgtgtgtgtacacccttgatattagtcgtaataaccagggcaaatatgactcctaatatcacacagtctgcacacyctgtgatattttycataatattttagggagatattscttctaatatcacagtgggtgtaccccatgtgtatactctgtgacagtgttttttatatcctagggaggtattactcgtaatatcacagtgggtgttcaccctgggatgtcattcttatttgaccttgctgccttttttaacccatcctgcaaaaggaatggaacagataagatattgagatgagactgtgctgccgtgcggctgcacggctgccacaggacacctttaatatccctgtttctcaggctgtagatcaagggattcagcatgggggtgaccacygtgtacatcactgaggccactgcacgctttctcagggaagacgacacatctgaactgaggwaccctccaacgcctgttccakaaamtcagcaaacaactgacaggtgagatccacaggtggcgaaggctttatagctcccacctgatgatgaaaccctcagaatggaggaaacamttttataktaagagaaaagggtmcccgagatgggaagaaaaccaaatatggcagcagggaaatacatgataatgttattggtgaaggtgtcacaacatgcaagatgggggagttgagaagggtcacagaagaaattaggaatttccacatccttgaagcaggtgatttgtaaggcgatcaagttttgcagctgggagtctaaaagactgagaaaaaaaaagacaacaaaaycaggaagccacagaaacacgggttcatgrtggctgaatgatayagagggtgacagatggctacaaactggtcataggccatcacactcaggagcatgtctctcttccatgcctccaaaaatggcagagagagayatctgagtcaggcagcctgcataggagatgactctgctgtgagattggatgtccacgatcatcttggggaccgtggtggaggtgaaaccgatgtcaggcaaggacaggttgcagaggaagaagtgcatggggrtgtggaggtgggagtcagggctgacggccaggatgctgagcaggttccacagcaccgtgaccaggcacacaggcacagyccagtgacgaccagctgcagtgctggatcctctgagagttctaggaggaggaatataaagacatctgttagattctgtgggtctgtatagtttgracatcttttgcttagaaaagagggttgaaaaaccggaaacaagtaaaccaacacccagcattgtgtctgcrttttggatataagcaattcacaagtcatgttttcagatttcagagcaatccacactcagcaatattttacagttctgacaaactcaattgycttctaatgctttcatcattgatttctgtgttattcacttcttgctctacacacctgccttagagacaytagrttcaagaatgttccaagaaccagatcatcatatataacaaattcrtaattgctagaaaatatagcctatcttttccgaagaamaatatgtaataaaaccattctcttcactttaagaaaaaggttatcctaattaaakgaaattaagaactcaaatattttattttattctaatagattgatacaaattcccttgatttagaacattyataaacactgtataacagctgaaaccatgccatctggaaatgaaattaaagttgatagttcataagcagaaaatagttccacatgccagttaggtcctagtgatttcattatgctttctgacttttctccttcaagagagtaattgcttactcaaatcggtgcatcttgttttaaaattcatgtaagctataactcctgtccttagcttaggtggacttagaattttcataagaacgtttggccagatgcggtggctyacgcctgtaatcccagcactttggggggccgaggagggyggatcacgaggtcaggagatcaagaccatcctggccaacatggtgaaaccccacctctactaaaactgcaaaaactttgcccggtatggcggcgygcacctgtagtcccagctactcgggaggctgacgcaggagaatggcttgaacctgggaggcagaggctacagtcagccgagatcacaccactgcactccagcctgggcaacaagagcaaaactccgtctcaaaaaacaaaaaacgaaaagaatcaagtaagtcgaagtcacgctgatgacagccaatgtttgtgaaccaaggaagtgtcgattcagtaattgacatagatgtttccttttgctatctcctatgtgccaagcaagatatagactctggggaatcagaaacagaagacactcacttgttcctctcacaatactcagtacttaccgagacaaagacaaaacaaaatgtcctgtttggaatgcagggaaaccagaacttcaggtcaggggatatttccggtgaattgtatggactttaagcttaaaatattaatgaatgtatctaaaattcactttgcctttactttatgcatccrtcacatagagatcacgcagcgggcacccacgatcggtttcatcatcgctcacttccattggatcaactagatcaactcagatgagagtgctgagtctcagaggatggacgtctcaccctttgccatacagataagtagaaagggtggtattccaaattcatggccagactctaagtcccgggtactatayttcatggtcttccaactctcaaaaagttgtggttttgtttttgtttttgtttgagacagagtctcattctgttgcccaggctggagtgcagtggagtgacgttggctcactgcaacctccgcatcccaggttcaagctattctcctgcctcagcctgccaagtagctgagattacaggcacacgccactacgcctggctaatttttttctatttttagtagagatggggtttcaccatgttggccaggctggtttcaaactcctgaccttgtgattcgcctgcctcagcctcccaaagggctgggattacaggtgtgagccaccacacccagcttcaaaaagttttaagcagagctcagaggtcttaaccacaggcacatctgaggagcatttttgaaacggtttccagcttcctcaataggaatggaagccaatctccgaactgatgactcctttgaggaagtcgagagctgtaaggaaagccaggaacaggggcaagggagagatgcatcccgaatgatcctgtactaattctttctggaatccttgatgtgatctcagctgccctttctatacttgacacagtgattgtggcacccactggtctagctgtggtctacaaggaacccccaaagggaagggcacagtgagcaggggcatcggcctgagtgacaaggatttgagagggcaggttggatgcagggagaggactggccaaatgccatgtgtctggacttagactgcctggttcaaattggacttcaccctttttgacttcatgatctggtacaagttatatgaaaatgcgttgctccttttctagtctgtaaaataataatgaaatgtgcactaataactgggagactacgcagatgaaatgaaacaagctgcatagagcacagagctcagagtctggcctttaggaagccctcagtaagggttcatggtgccatggtgtctgtcatcatcctctttatcctcatcatcaccttcataatctttttgttgttcttagggaatagtttagagagactcattccctgctatcatggatgagatgtctatgaaaaggacaaccagtgggggaggaaagcaaaattttgaataagatttctgagaccccccaccacaaccaagaacagaaactccacagtctgctgagtggacagtttgcacattggtctcctcccatctgcccaccgcactctcttgtttgtcttgaggatgaggaaacaaaacaagcctcccagcggtccctcagcactcactgaactgcccttcccctctgctaggccgtgaccacggagaacaggtccactgtcctccctgcgtggtgcatgatggaggctcagactccgtcctcaaggctggcaagaagacagggtgagacatgagcctcctgatacaggtgacgggtgtggagcccacaggactggaacctcacactgcagggctggaggcacagactgagtatttactattctgtggcctgggggcctcaaggcacagagctcctcattagccaaagtcacccaagttccccaacctctaaggatttcctcataataatgcaagaagaagagaaaagtgagtgtccatagaagctttggggctcttcctctaatcaggagaaagctggtacgtattattcgcttctttcctttttaaagatccaactgctttcattttcatctttgattatgggaaaatataccacatataaatattaaaaattataaatatatattatttcctatagaatggccagtataaacatttacaatttccactgtttttcagtttacagtttaatgacattaagtacattcacattgtttagcaaccatcaccgccatcatctccagaacagttttatctttcaaaatggaaattgcacccattcaccaaactctccattcctctctctcgcccacccctgggggccaccattctagttcacaactctatgagtttaactactctagacacttgatagaagtggaatcataccgcatttctttttttttttttttttttttttttgcagaccgagtctttctctgtcgcccaggcaggagtgcagtggtgtgatctcggctcactgcaacctccacatcatgggttcaagcgattcttgtgtctcagtctcccaaatagctgggattacaggcgtgtgccaccacgcccagctaatttttgtatttttaatagagacgagctttcaccgtattggccaggctggtctcgaactcctgaccttaagtgatccgcctgcctcagcctcccaaattgctggggttacaggtgcaagccactgagcctggtcatgtttatccttctgggatttatttatttcactgacgataatgtcttcaaggttcatccacgttgcagcctgtgtcagaagtgcctgtctggtttttttgtttgttttgttttgttttgttttattttgttttgttttgtgtttacatggagtctcactctgtcgcacaggctggagtgcagtggcacaatctgggctcgctgcaacctctgcctcctgggttcaagcgattcttgtgcctcagcctcccaagtagctgggaatataggcacacgccaccatgctcatctaattttttgcattttcagtagagacagggtttcaccaagatggccaggctggtcttgaattcctgacctcaggtgatccgcccacctcggtcttccaaaatgccgggattacaggcggagccactgcaccagccagaagtgcctgccttttgaaggctgaatagtcttccactgtatgaatgaactgcagtgtgctttttcattcatctgtccacgaaccctcgggttgcttccacattttggctgttgtgaataatgctgctatgaatatgggtgtacaaatatctcttccactcctggcttctaattctttttggtaggtacccacaaatgcaactgcaggaacatctgataattctgtttctaatttttccagtacacgccatactattttcactgttgcttcacggttttacattccctgcaatcatattcgagcattcctacttccctctagtctcaccaatgcttgtttatcatatccatcctaatgtgtggtatcacattattggtttgatttgcgcttccctatgatgagtgattttgaacatcatcttagatgcttattggccattgctgtatcttctttagggacacgtctactcgagtcttctgaccattgtcaatgggatgctttgggtttcttgttgcttagttctagctgttctttatacatgatggatatcagcctcttttcagatatatgatttgcaaatatttttccgaatccatgggttatcttttcactcagttcacagtgttttttgatgcacaaaagtgtctgtcatttagatgtaatccaaggaatctaattttctttcgttgcctatgcttttggtgtcatatcccagaaagcattgcccaatctgatgtcatgaaagtgtggccaatgttttctttgaggcatattatacttttagcacttggggttaggtctttgatccagtttgtgttaatttttgcacctggtgtgacatagggtccaccttcattcttctgcatgtggaaatcaagtttctccaacaccatttcttgaaaaggctgcttttccaccaatgagctttcttagcactcatgttaaaaatcatttgaacacataggtgagaagttatttctgggctcaaaaacaaacaaaccacaacaaacaacagataaggatacagcatgggccgggcgtggtcgctcacgcctgtaatcccagcactttgggaggccaaggcgggcggatcacctgaagtcaggagatcaagaccagcctgaccgacagggagaaacccccgtctctactaaaaatacaacattagctgggcatgctggcgcatgcctgtaatcccagctactcaggaggtggaggcaggagaatcacttgaacccaggaggcagaggttgtggtgagccaagattgcactgttacactccagtctgggcaagaagagcaaaactccatctcaaaacaaaaaacaaaaaaccagcatgatttcaagagcagaagacaagagcttaaaaaccagcataatgagaaagttaggaagcttcttaccaaagcatctggaaatatgcaagaaattcttgtgaactaaaattttcatactgtactatcaaacactagaactcacttactccatctttctgtattttgggacccaattatccacttctcctcattccccatccaccccttttcttcctagcgtctgctaaccccctttatactctccaccttcctgagattccttttgtttgtaggtgtgtgatggagtctctttccattgcccagattggagcatacaggcacagtccaggctcactgcaacctccacctcccgagttcaagcgcttcttgggcctcagccttccgagtagctgagactacaggcacgcatcaccacgcctggctaattgtttgtgtttttagtagagacggggtttcaccatgttagccaggcagctctcaaactcctggcctcaagtaatccgtgcaactcggcctcccaaagtgctgggattacaggcctgagccacctggccaagattttcttttttgttcctacgtataagtgaggacatgtaatatttgtcattctgtgcctggcttatttcacttaacatacagacctgcaatctcatccattttttctgcagcggagaggattttattcctttttaggctgaataatacttcattgtgtgtgtataccgcagtttcttaattgaaacaaatttctaaaaagcaaatatttaaaaaatgtttcggaatgtgaaactttagggatattgtgcccattttattcttttctatttcccattttatgtatatgcaagtgtataataaagcagcaatcaatgtgtgtataaatctgtaacttcaacaaatgtaaaatgaaaatgctaagtggtggctgggcgcgatcgctcacgcctgtaatctcagcactttgggaggctgaatcaggcggatcacctgaggtcgggagttcaagaccagcctgaccaatatggagaaacactgtctctactaaaaatacaaaaaaaaaaaaaaaaaaaaaaaattgccgggcatggtagcgcatgcctgtaatcccagctacttggaaggctgaaacaggagaatcgcttgaatacgggaggcagaggctgcagtgagccgagatcatgccattacactccagcctgggcagcaagagtgaaactctgttaaaaaaaaaaaaaaaaaaaaaagaaaagaaaaaaagagaaaatattacttccattatcgcagggggtgctcacccctgatgatattgttttctaatatccagggaaggagagtatgatattactcccaatatcgcagggggtgtacacttttttgtgatattgtgtctaatatccggggaaacagaggatgatattactcccaatatcgcagagggtggacacccccctgggatattgttcctagtatcccaacggggagaggatgatattactccccatatcgaaggaaatgtacaccacccctgtgatattgttcctgatatccagagaggaaaagaatgatattactcccaacagcgaaggaaatgtatacccgcgctgtgatatttttcccagtatccgggggggagaggatcatattacttccaatatcgcagggtgtgtacaccccctctgttatcttgttgctaacatccaggtttggggaggaaaacattactcccaatatcacagggggagtacacccctccgtgaccttgttagtaatttcctgggtggagaggatgacattactctcaatatcgcaggggtgtacaccccactgtgatatttttctaaatattcagggcgggagacgataatattactcccaatatcgcagaaggtgtacattccctgaccatcaaacataag

SEQ ID NO: 97113 - DNA, 55785 bp, Homo sapiens
cacgtgcctgtaatcccagctcctcaggaggctgaggcacaagaatcgcttgaacttggaggcagagattgcaccactgcactctagcctgggcaacagagctacactctgtttcaaaaaaaaaaaaaaaaaaagattgcaatggagctgaaaaattcctatcatctagtgacatcatagcaatcataatactgtagcacaatacattactcatgtgtgtggtgatgctggtattaagaaacctctgtttcagtggtataaaagtatagcacatacaattacatataccacataaaactccataatgataataaatgactatgttactggtttatgtatttgctataccagtagtccccaacctttttgacaccagggactggtttcatagaagacaatttttccatgaactagggggtggaggatggtttgaggatgattcaaatgcattacatttactgtgtactttatttctattacaattacattgtaatatataatgaaataattatacaattcaccataatgtagaatcagttggagccctcagcttgttttcctgcaaccagatggtcccatctgggggtgatgggagacagtgacaggtcatcaggcattagattctcataaggagtgcacaagctagatccctcatgtgcagagttcacaatagggttcgtgttcctgtaagaatccaatgctgctgcagatctgacaggagacagagctcaggtggtaatgcgagtgatgcagagtggctgcaaatacagatgaagctttgtttgctcacccgccgctcacctcctcttgtgcagctcggttcctaacaggccactgactggtaccagtctgtggcctggaggttggggacccctgctttatcttatttctcgcatatttagtgaggcctcatcagttgttaaggcccagctatttatcttccccccaaatgtatatattgaaacactaatccccagtgtgatagcagaggaggtagagatgctggaatgtgactaggtcacaaaggtggagcccttatgaatgggattagtgccctggtaagaagctgaagaaaccacagttgtctcccttccaccatgtgaggactcagctagaaggtaccatctatgaaccaggaagcagaccctcaccggaacacaaatctgccagtgccttaaccttggatttcccagcatccagagctgtgagaaataaatttgttgtttataagtcacccaattaatggtattttgttgtagcagcccaaatggactaagacatcagctaatgtatatagaatattttttacatatttattggctttgtggcttctaacattttaaaaataaacttaaaaaaagagagagaacaatgtctacctttggccacttgcctcctgcaggggtgggaggtggttggggacgcctatactatactttttactgttattttagagcgcactctttttacttacaaaaaaaaaagttaagtatataagagcctcaggcaggtccttcaggaggtattccagaaaaagatattgtttttataggacatgatagctccatgtttgttatttttcctgaagaccttccagtgggacaagatgtggaagtggaagacagtgacactgataatcctgaccttgcgtaggcctaggctgatgtgtgtgtttgtgtcttagctttaaagtttaaaaagtaaaacaaaataattaaaatggtaaaaatagaagatatttttgtgcagctgtaaatgtgtatttttttaagcaaagtgttatgccgggcacgatggctcacgcctgtaatcccaatactttgggaggctgaggcaggtggacgacctgaggtcgggagtttgcgactgccttgaccaacatggagaaaccttgtctttactaaaaatacaaaattagttgggcgtggtggtgcatgcctgtaatcccggctactcaggaggctgaggcaggagaacttcttgaaccctggatgcagaggttgcggtgagctgaggttgcactactgcactccagcctgggcaacaagagcaaaactctgtctcaaaaaaaaaaaaaaaaaagtcaagaagttttaaaaaatgtctgggcacgttggctcatgcctgcaatcccagaactttgggaggccgaggtgggcagattacttgaggtcaggagttcaagaccagcctggccaacacaggagcttgtggggtgtgcggatcatctctactaaaaatacaaacattaactgggcatggtggtgcacgcttataatcccagctacttgggaagctgaggtgggaggattgcttgaacctgggaggcagaggttgcagtgagctgagatcacgccactgcactccagcctggggatagagtgagactctgtctcattgcttgaacctgggaggtggaggttgcagtgagctgagatcgcgccactgcactccagactgggtgacagagtgagactccatctcaaaaaacaaaaacaaaacaaaacaataacaacaaaaaagttttaaaaaataagaaagcttataaagtaaaaaagttatagtaagctatttattattgaagaaagaaatatgtttaaacatttagtgtagcctaagtgtacagttgtttataaaatctacagcagtgtacagtaataacctaggccttcatattcacttaccactcactcactgactcacccagagcaacctccagtcctgtaagctccattcctggtaagtgtcctatacaggtgcaccatttttaaagcttttatgctgtatttttactgtatcttttctatgtttagatacagataccattgtgttacaagtgctacagtattcagtacagtaacatgccgtataggtttgtagcctagaagcaataagctatgccatacagcctaggtatgtagtaggctacaccactaggtttgtgtaagtatgtgatgaaattgcctaatggcatatttctcagaatgtatccccgtcaagtgacaagtgattgtattgtggcttactttaaaatgagaggtactcttccctctatccatatccaatcaccacttttacactgggagaaatttttgaaatttcaggccaccataataacatatttggcttctggaccttgtctttgctacctctaccctaattattttactgcaaatctttctcttggctcaggtgtctggaggctgatcaggcacaatttgaatcttctatgattagaaaagggagttcaatttcactagtgaaacactgttggaatcagaacttacaccaatgctgaacagccagaatataagaactgagagtaacataagtagaatggaagccagatgttattaacccttcctattaactagaagaaaatgttaatgttatagaggatgctcttagctccaaaactgagtcctagttgtgcacatgtcaaatctaattaaaaatataaaaattaggccgggtgtggtggctcatgccttaatcccagcacttcagaaggccgaggcaggcggatcacaaggtcagaagtttgagaccagcctggccaacgtggcaaaaccccgtctctactaaaaatacaaaaattagccaggtgtggtgccaggtgcctgtaatcccagctactcgggaggctgaggcaagagaatcgtttgaacacaggaggcagaggttgcagtgagctgagatcgtgccattgtactccagcctgggcgagaagagcaagactccgtcttaaaaaacaaaacaaaacaaaacaaaaatacaaaaattagccgggtgtggtgccagatgcctgtaatcccagctacccgggaggctgagacatgacaatagcttgaacatgggagacagaagttgcagtgagctgagatcgtgccaccgcactccagtctgggccatagagcaagactccgtctcaaacaaataataaataaataaataaataaaataaaaagaaatgcttggagtgctcgggatcttccacttcaacctggaatttaaatcttactgaaatttctacaggatggtgtgggcaaacaggcatcctaatgtttgctgatataagtgcaaactgcataacttctataaaaagaaatttagaattagcaaaatcataaatgcatatattgagatctagcaatttcaattctatttcatcctacagatgtaacagtttttcaaagcttttcattacagcactgattaagactagaaataatctaaatatcaatgtttatggaactggttaaataaattacggtatatcccaacaatgaatcactacgcaggtgggttaaaaaaaaaaatagacggccgtgcgcggtggctcacgcctgtaatcccagcactttgggagactgaggcgggcggatcacgaagtcaagagattgagatcatcctggccaacagagtgaaatacaaaaatacaaaataaattagctgggcgtggtggcacgtgcctgtaatcccagctactagggaggctgaggcagaagaatcacttgaacctgggaggcggagattgcagtgagcggagatcgcgccattgcactctagcctgggcgacaagagcgaaatttagtctcaaaacaaacaaacaaaaaaccaaaaaaacacaacccttcatatacagatatgggccgatctccaatctacggtaggctaaaaatgcagcttacacaccatctgtgtaaaaaggggaacacattaaaatatgcatatttatttgcttttatgttcatggaacatctttagaggatcataagaaactgttaacattgccactgaggaagtgaacagccttccagacatgggtggatttttttcactctaccgaatacccttttaatttcgaaacatcaaaatgaattcgcatgcacaggtgcatgcccgaaggaaaaacttctagttcggtgatgagatagggaaagccggtgagttcaaccttaggcgcaatcaccctgtgaaggtgtggccagcgagggctttgtcacgcaagtctgagaactgtcacaaccttccccaccccctgctctattttccttccacttgtttctgaaactcactaagctttggaaagtatttagtcatagaattgcttgcaaacttggcattctttagaaaacacggaaacacttttgctttccttgttcctgaaagactggggaacgggggacatcaagccaggtaacattgtatcataactgaaattcaatgtctttgaagtaacattgtaccataaatgaaattcaatgtctttgaagtaacattgtatcataaataaaattcaatgtctttctaagagctctgtagctataaagctgtagaaatacaaagtattactcaagaataactagtaattaccaatagtcacacctcaggtcaaagtttggagaggactattccacctactagatcacactttccttcccgaaagccgcttctctctctggcctctcccctcctcctcctccctcatctgtttggcgggaggcttcctcacattaccgctccgcgtaagtgcgaagacgcactgcagcagcgccgtctgagggacaacagagcctactctttcttctcatctctatgatcctctttgtgacctgtcaaacaacaccagagttccatgctaatagtactccactccgacagagagcgatgcaaagagccgacgctctcgcgagaggtgtggggctctctctctctctctcgctctctctctctctctctctctcgctctctctctctctctctctctctctctctctctctctctctctctctctctctctctctctctctctctctctctctctctctctctcactctctctctttctccaagtattgagagcgcgtgggagcataggcgcatgcgcgctcgtggggtgcgcggtagcaacagaggactcgacccggctggagctccggagagcgcgcgtgcgccgtcacgagctcggcgctgccggggccgcggtgtggaagcgagtattcgaccgccgtgcgggccgcggggatgttccgaaaggcccggcgggtgaacgtgcgcaagcggaacgactccgaagaggaagagcgggaacgcgatgaggagcaggagccgccgccgttgttgccgccgccgggcacgggcgaagaggcgggccccggtggcggcgacagggcccctggcggggagtcgctgctgggcccggggccgtcgccgccttccgcgctgaccccgggcctcggggctgaggccgggggcggcttccccggcggcgcggagcccggcaacgggctgaagccgcgcaagaggcctcgcgagaacaaagaggtgccccgggccagcctgctcagcttccaggacgaggaggaaggtaaagtgcgcgcttcggacgcccttagacggccgcatccccgacgcaggcccccgtcccccgcccccgtattctctggacgcccagccccggagccctggaacggagtcccctgccgtccgaccggctgcgaatcttccccagcctccggccttctgctcgggcaagggacgcgttcccgcgctgcccccagccttttcttaaccacctcctctgccacggggccggagctcagatcaggcattcagagtgtttcaggggaaattcggtgttccctgtcctgcctcttttctgcctggcgtgtttcagggccaacttggtgtgggtcccctggctgctcttggcatgctttccgagccctctgcaggtcactgcgcccacacttcttggatgctctgtccaggcatcctcgaccatgaaggccgagtttgtaaaaaggaatactaggagagggaacagaagcctggagttgcagctctggttctgagtgaccttgggccagtcccttgcagtcgctgagcctcagtttacccataaaagtaattaggggtagcagatacccagccttcttcgcactgactttgggaacagtgaagcgagacggtgtaaaaatagtaaaagcaaggtagtttctccaattcctgtgggaggccaggctgcagtggttttagattgctgatcttaaatgagccttaaatcttttcttctgaccatttgaatgtgcataacccagttaattccatgttacgaaaaaagaaattaagttttgtaaatcttgcatttttattcgagaggtttccagtaaggtaggtagtttatctttggcatttctgttactctttatttggtttgagaggagtacagacagatttttgtttttgagatacatgagctatttttttttaagtatttagtacttttaaaatttcaaatcaaagaaaagtgrtttgcccttaccttagctttaaaaccactatgtcagcttgtggtggatgtagttactcagaattgacagcacctttttattttagatattttgtttcggattcgttaataacttggtgatgtggtttttcagaaacattttgaatgattttttcccctctcaaatagatgatttaaggacgacaataataggaaaattttgtgaagttacatgtgctattcctttaaaaagtctcaaaaatctcattacttcacagtaatttaggaagttgacctctgtttttgagtctgtgacagacttgaaataattatacaatgattttggcatatgagtatatatatttgggataatttggacagcacgtaagatcatgtgaaagaagggaaaatattttcagaaaatagttgctacagacttcatttaatttcctttttaagaaaatgaagaagttttcaaagtgaagaaatcaagttatagcaaaaagatagtaaaattgctcaagaaggaatataaagaagatcttgaaaaatcgaagattaagacagaactcaactcatcagctgaaagtaagtaccaaactaattgaattcttttgaaatgacaaaatgaaagctctttctcacagtgatttgctgtatatcttctgaactcattcagtggaccctgtggttgtcaagggcccttattgagtagcartacagttctgttatttaattgtaacacagatgctttgtaaatgtattttataagaagacagaattgttgccactggaacatttctgctgcaatgactagattctctcacagttttcctacttgtgtgcagactgctgttgaacagagaaagaaggtttctcattttagcctaagacacaggtttatttctgtttgaaggagtgttgtgcaaattcttgtattttgtagagacagatttgcgatttctttggtggtatttccacagtggattttattmttagagaacttttaggaatgccctaaatttaatattagtattactcccattcagcagccttatctgatactagatgaagactccttagaataatgaggcaggtatattgtacagacatctcttacgtctctcaaaacctcagtttaaaaaattttaagcggttattttgtctttaggaaagtggatccagtataatattctatggtctgagttattctcctgcaaatgctattttattttatggaattaatgagaaaatcatgattttccagattctcacttacaggcttattgtgaaaaagtatggctttgtatctcaaatttacaatctagatgtgaagacaatatctcataaatgtgtaagaggactcagtgtttggcaaaatgttcaatcagtgttccaaagggtggctactctttcagaggagagaggactgctttatggaaaaagtgggactcgaagatggatctttgatagttaaaattccgaaagggaaggtattgggggtatgatcaaggattaaaatgactaaagctgttttggaaaagaacaagtrcacctgacaggtcagagtagatgatttgtgaaggaagtagttagaagtttcatgtgaaagatacgttgacagattgtgaaggatgttcagtatccagtaagggtttacatttgctacagtggcttgccaagatggtgacatgataaatgcgttttgaaactttagcctggtattaacatgcagcatgaggagagattggaggcctaaagcagtttaaactcaagggccagctttgatccattaatagtgggtttaaaaaggtctcacagttgagcaagagtaaaggcttctactgatttagtaggaaattctggatgagttaaaaatgttttctgttgttttagggggagaagtggaaagaaagaatgatttgagaaccattccaagggaagaattgataggcttaatatacactttgccatattggatttaaaagaaagagtcaaatttgaacttttgtcctggagtgtcttaatccattttctgctcctgtaacaatactacagactaggtaatttataaacaatagaagtttatttggttgacagttctggagtctgggagggccaagagcatggcacaggcatctactaagggcctttatgttgtcataacatggtagaagggcaggtgagtctccaagacagagagagaatatcctgccaaactcatccttttatcaggagcctgggataatggcattcaccttctcatgttgtaactgccatttaagggccccacctgttaataacgttacaatggcaattaaatttcaacatgagttttggagaggacactcaaaccatagggtgtcttggttatgaataattatatataggaatagagaaggcaagtggaaggaggaatgtttttaggagaactggttattttggagtctaggaaactgccttattttcctcagaattcttgagaccaactatatatgatgagagtaaaagaaaggtcaggataagtgacaactgagaaaggcctgttgtcatggttgttgtattaagtctgttttcatgctgctgataaagacatacccaagactgggaagaaaaagaggtttaattggacttacagwtccacgtggctgcggaggcctcagaatcatggcaggaggtgaaaggcactttttacatggcggcagcaagagaaaatgaggaggaagcaaaagcggaaacccctgataaacccatcagatctcgtgagacttattcactgtcatgagaatggcacgggaaagaccagcccccatgatttagttacctcctcctgggtcccttccacaacacgtaggaattctgggagataaaattcaagttgacatttggatggagacatagtcaaaccatattagttgccatttattgttgggtttagaaattgaaacaagtgtgaagttgatgaagccatctctgacctcttccatccttctatcctcattgaattctgatactccactcactagataactccaattaatgtcctctgaaggcggagtctgattgtattgtaggttgtcattggtaacactgaaatgaaggtctgtcattaattggcaatccagaactcttcctaccttcaaccctctatagtaggcagagacaattaacttcaaaataaccacggtattgacttgagaaccccatttttctgatattcttaaaataatgagttctctttttaatttgaatttgagtggaagtagtcagtgaatacctagagatgtagatttgggggtggtgcttattgcggtgataattaaaggtgaatggaattgatgagggagccgtatataaaggaaaaattcctgaagaccaaagacttctactctagtaagcctacatgtagaggaagggatttaccaaagagataaaagaatcaggaaggccaaagaggaaaagagaagaatgtttcaggaagatgatggtcgcttgtgtgaactagtacaagaaaagtcaggaaaagtgaggaccaaggaggggctattggcaagattgcccagcgtttctcttgagggcttctgacaggatggatgggagtggcccaccagccagacccagtgccctcagagatgtttggaagaaggaacatcttttgctaaattgcttgatgatgctatcatatatgaattagccgtggctgcagccattgggttaggttgggtgaaatcaaaggctgtttgtagggtcaaggcacaaaagttggagaggaagtagagggcagcaggtccacactgcttccttgggaagtttggcagagagagactaggcaataactagagggaccaatggagtcaagtgggaaagctcttttgatgaagagaagcctgtccctctttgtagaagaggagagggagagcctgaccaggtttaaggtgaagtgggtaataattgtgagcaggtttcctgaagtagtagtaaatgaaattgaaggcatgagtggagccttgaaaaaggttatttaacatctatatagagatgtctggaagggtaacatgtgaccactgacattcacatatcaccatgctttcggcttgtgtttgctcaatcataagcaaatacttgtgaatttaatgaaacattgaatcctaaaatttgtaggaatcattcattatctgagcatatctgatgtagtagaccttttgtgcttttgtttttagtccattaacagccattggtttagcatgggtaaatttgttttgtttttgaggtggaatctcgttctgttgctcaggctggagtgcagtggggcgatttcacctcactgcagcttctgcctcctgggttcaagcgattctcctgcctcagcctcctgagtagctgggactacaggtgtgcgccaccaagcccagctaatttttgtatgtttagtagagacagggtcttaccatattggcctggctggtcttgaactcytgatctcaggtgatccacccgccttggcctcccaggggattacaggcgtgagccaccatgcctggcctagcatgggtttagagcaaaaggaaataggtagtttttactccatctaataatgtgataaagtgagttttaaaaccttatagcttcataatccatttcagagggaagtctgggtaatgagaaaatggtaaatgaaaaaaaaaaagaaaaaaaatgaaagagcctaaaagaggttacctaaaatcttcttggtaaagttaaaaagaggggagggatgttatctctgggactgttacttaagggagtacagtatggtttgagaagaaggaagaagtttgaagcagttttggggacaggaacattctaaggaaatgacagaaaaatatctttcatattgagaataaacttttgctttactctttcagtatattccttgtgcctgttgtgagcattaccaggttcagtgcttcaaggtgaagcacttcgatttttgcctgggacagaggctgtattaggattatttaattgtaagtaatgtaaaccaggacagtttatcattaagatgtagtggtgcctcctggatgacaatggcaggaaagcaatcttgaaatgggcctcaggagtggattagaactgagaattaggaggctctcttctctgtccagatggcacaatgtggccattcctcagctcccttcctagtttacatattcatgtagcctttagtttcagtcctgattccagattcccagaaagagaatctggttatctctgcttcagtcagaagtccactcttaaacattgagtcgtggtagtggggtcaggcttgcacagtgtaaatgtgactgctgggatctcatctctttaggtgataggtgacaagtggttttgagctaagaaggtattccatgtaagtgtccattactaagagacttagctggactgtaaatgtgctttgttcataacagagttgcctcgcatgggcttagggtttaatgaaatactaacataaaatgaagtaatgcttgaaagaggtacaagcagttccttgtgggagtttagcagaaaaaacagttaattttgataaattgttgacattttgataaaattaactgaaggtggaatggagcagggcctcaaatgcatcctttattacatcctctgtattatttttacctaatcctgtctgttatgctgtttcatactcacacactcaagagttatgagtttttaacaaacaattaattcaagctttactggattgagcccataattgaatgaaaagttcccctttttttaattaaaaaaatttttaatgatgtcaataccattggaakaaactttcttaatttatgaaktttattttacatatattttaattcttcaaaaatttaggtgaacaacctttggacaaaacaggacatgttaaggatacaaatcaagaagatggagttatcatcagtgaacatggtgaagatgaaatggatatggaaagtgaaaaagaggaagaaaagccaaagactggtggagctttttcaaatgctttatcttcattgaatgttcttcgtccaggtgtgtactcaaaagtatttctcagaactaaactaaaccctcaagaatgggccatctttaaagatgattattaagaaggaattagctgagtggtgtttcttattatgacattgctgtttgaagagggagtttttccatttgcaaatataaaaaataggagaaccagaagtttcccaacttttccaagtttattcacagacaggtaattgtattttgcaaataagtcttcaagtaaatggaaaaatggtcctgtagtcctttttaatgtatttcagattaagactgacttaactttcttctgaactgctgctaaaagcaaaactagtttctgttagttttttttttttttttttgctttttgaggcggagtttcccttttgttgcccaggctggagtgcaatggcacgatctcagctcactgcacccaccgcctcccaggttcaagcgattytcctgcctcagcctcctgagtagctgggactaacaggcgtgcaccaccatacccagctgatttttgtatttttagtagagatggggtttctccatgttggccaggctcgtcttgaactcccaaactcaggtgatccgcctgcctcggcctcccaaagtgctgggattacaggcgtgagccactgcacccggcctaatttctgttagttttatgtccacactcctttttacttttctgcaaaaaatagtttgcaggtctatccactggctaatcagcctttgaataaataagtgcttagtagccagatttaaattatgaagcagtaccatttaactcctgttaatgtttatacaatttaaaaatatgctactctgggctgagaaagttgtagtaaattctatacatacatcactagtggcagtctgattggtacagtccttatgggaagctctttggcaatatgaatcaatagatttcaaaatgttcttactcttgacccagtaatttcatatctagagatttatcccaaggaaaccatgtttttattggaacatttgcaatgagcaacatttaggaaaaaatgtctagcaggaggggaaaggtttgttagaaaattacagtacatttacttgataggatattatgtaactgttaacaattaggcaagtagggaggcattaatttttgctatactcaaaaggtcagttaatgtgtgcggtagattatgccttatctatgcagaaaatgttaaaccattaaaaattatgtttatggagaacaataacatggaataaaacttattatgatatgagaaataggtacaaaattaaatatttagtatgattacaggtaaactaaaaactatctgcaagagaaatgtactatacatcatatagtgccttttcagggtcatgagattatattatttttatctgttttccagcatcataatacagtttcattacttttttttttttttttttttgagacrgagttgtgctcttgttgcccaggctggagtgcartggtgcaatctcggctcactgcaacctctgcctcctgggttcaagcgattctcctgccttagcctcccaagtagctgggattacaggtgcccgccaccacacctggctaattttttgtagagatggggtttcaccatgttggccaggctggtcttgaactcctgacctcaggtgatccacctgcctcagcctcccaaagtgctgggattacaggtgtgagccactgtgcccggccacttctatttgttaaaaatgaaaaaaaaaattatagctaaaataaaactgctttggtgggtttttcctttttaccccgtcccactctttcccatrtatattaccattatatgttctttttagtttcctcagtgacttttatattccatttaaactcaattaacaatcttttggattgcagacatagtatgggaaggaggtgccascagctgaaacatcactgtgatgaggctatcttggattattttacccttcatattttcaagaaaatagaaactttgcatctctcatactgccatattcttaccatttgtttctaggagaaattccagatgcagcttttatacatgctgcaaggaaaaagcgccaaatggcccgagaattgggagatttcactcctcatgataatgagcctggtaaaggccgccttgttagagaagatgagaatgatgccagtgatgatgaagatgacgatgagaaacgccggatagttttttctgtgaaagaaaagtcacaaagacaaaaaattgctgaggaaataggtaacttgatttaattgaatagtaagcctattgcattgcctttttttgtttgttttaaggcagggtgtcattccatcacttaggccagagtgcagtggtacaatcatagctcactgcagtgtcttgactcgtggactcaaacagtcacccttgtctcagcctctcgagtagctgggactacaggtgtgcgtcaccacacctggctaatttttttatttttaatttttttgtagttatggggtctcactgtgtctggtgtcttaactcttggcttcaagagatcctcctgccttggcctcccgaagtgctgggattacaggcatgagccaccatgcctcagcctcccaaagtgctgggattacaggcatgggccaccatgcctcagcctcccaaagtgctgagattacaggcatgagccaccatgcatggcctctaatgctattaaatgtgatttgatattatagtcaagtaaaaagtatttagacttactaaattttatgttagaggactattcttgggtacaagtgttttattggaatttttaaaaactaatatcattgtgataactcatgttcattgaacatttattgtgcagctggtattgtgcttagcagtttacatgcgtaaattcatatagttctatattcctaggaggcattagattttgttccctttgttgatgtcaagtttacagagattaagaaacacatccaagattttaactattacattaatactgcctttagcttcaaggaatactgtgtttaaaacaggcaaagtcaggactaccaaatgagagaggagatcatattagacattttagtaagattgagttaatagttttgctcagttcttgtgaaatgtcaggacagcatcttttacctctttgctctttgggtgttacttacttttctttgttgctcatggctgtaggaattgaggggagtgatgatgatgctttagtaactggagaacaggatgaagagctcagccgatgggaacaggagcagataaggaaaggaattaatatccctcaggtacgacaaaagaattaaactaaaaattaaaagtagattaaaaagccttttttattttgttaaagtaaaaaattccgtattgaatctttgtcattcatttcaagtaacaaaatcccatgaggagacacacacacacacacacacacacacacacacgcacgcacgcacacagagacacgtaggcttttagaagaaactgcagtgtgttcggctttttgcagtcagaatgatggaggaatttccaatttcttagatgagtttttctcaaagtggtccttcagttagcattagcattacccggtagctcattagaaacgcaaattaccaaattatcagcccccagagacctacagagtcagaagcttggggtggtggggccagcaatctttgttgaacaagccctccaggtgattctgatgcacactaaagtttgagaaccattgctttaaatggaatgtttttgtgcgtgtagcttatttttttggactttaagaattattttgaagaagatggatttctcaataatacaaaaaacttgagatcgatgaaaaatatcttcccagttataacaatttgttttataaaagtaagtaatacagtgagaaaaattgcataaacgtaaacctatttttgttaatagtgttttgaggcagaattcgcatacatttgggtgaagttaagaaaatggcacaatagagaaagtcttggactggatgtcaggagtcttagattctaatctctggttgcccattgattctgtgaccatgggcaaggcatttatcctctttcattgatcaaaggtggccttaaatgatttttgatgtttcttccaactctgaactctgtttttctgaaaattattagaaataaatttagtgattccaccaagagataggacattcattcaatcctgcttttatctaattttgaagaattctgcaattattacataatatttggcaaataggtataatttttgctgttgattttttaaccctaaaggcatattattattttcaaagttttaactaccagatttcatctatatcccatttcttttctaggttcaagccagtcaacccgcagaagtgaatatgtactaccagaacacttaccagacaatgccttayggctcatcctatggcattccttatagttatacggcctatggatcatcagatgccaaatctcaaaaaacagataatacagtccctttcaaaactcccagtaatgagatgactcccgttactattgatttggtaaagaaacagcttaaagacaggtagggcagatcaacttcttaaagacctgtccgctagctttctgttccctcaggcaacatgtagtctggggtagcagatgcagaatatcagcaaagaagattcactggcccagcttcaaaagctaaacagaagatgacttcatactttgttctgctaccttcttggattacttctgtggaagcctcgaaaaattataaaaaatgccactccatgatcttgttgaagacatttctgagtttgtacctcttggactctgaaaaagtgtagtcacgctatggggggaaaagcaaaacagtgagattttggttagcccacaaaactgtgaaatctgtaaactgccattttttgttttttgagaaaaaaagcagtacagaggaaaagatgccattccaaatatttttatgttctaatagtggagctaaatgcatattttaatattgcaagagtcctgacaccatagacctttggatgtaaatgtgttatatttatccttttgtgttcctaaggttggactccatgaaagaattgcacaaaacaaatcgacagcagcatgagaaacatctgcaaagccgagtggactctaccagggctattgaaagattagaagggtcttctgggggtattggtgaacggtataaatttttgcaagaaatgcgagggtatgtccaagacttgcttgagtgtttcagtgaaaaggtaagaatgcaaaaatactaatctctttgaataaggcaaaattagggaggtctagatggccttgtgtagaacattctataattctcagaaagtacccactgaactcaacattagaagtgatgaaaagtcatgcttcatttttcttcacttcattagtggcattatctcttaagggcaatataatacctttgttgaaaacagaaataaagataatatcttaaagcacatttaaataagactttggaaagtcttatttcaatatggtggtagattattattggcctgtgctgaattcttagaatataagggactcatctgataaaattttcttttctggttcaggtttaaacttatttttaaacgtttctacaagcaattctaaatatgcatataaagttgcaaatttttattagttttttttttttttttttttttaccctggatgatgattaccattgttgctaatagtttttatctaagtaagcctatgcttgatttctttcagaaaccatttcattggatatcattttttctaaggtttcatttctcccaagtttgtttttttcaataggatagtcagttgacaaaatgtttggcattcttatactatttattgtttacatttaaaattaggtgcaaacagctagtttctcaaatgacctcctaattgattttttttctttaagataaaagtattggttgaggcactggtttataagcatttgtggactttgcagccttatctttaaaaaaaaaaaaattaaaactgtggtccttaaatatcctgtctgaactttggattggaaggcacatttccctttgttattggctatgtagattagcttagaatctgtaagcatatagtgtggttaaatatgtatttcaacttttgttatctttgttgattacttgaataccctaaaaccaatggctgggaaaagatcattgccagactatgtcttcctgatggatctttcttcctgatgggtcttaatggttccagtcagtctgtggccagattcaggatgagataacattcaccatgtcctctctgtagggtttctcatgttttgtctttatcacctggtttctggagaagcagctgcagtctgagttatgataccacttgtggtgtatcagttgcttagggtggggaagaagtataggcttgtctgtattcctctgtgccgggagctggagtcaagattggaagtggaacctaagtgtcaagagttgacagtcatgtccttcctactggcaaaactcttctgagcccagtgggcatggtgggagctggtctcataacctttgtgactagagaaaggatctttttcttaaactatgctttatgagtttgtccctggagagctgcttcttgaagtgtcttggcgcttgcttcggaactttcttgagtaaattaagacattcataattgcaaacacaactctaaaaaatttgacagtaatatgatcagctagatcataccaaaagtaggacaacctagtttatagtttttaattgttgaattattagtgtatttcatctcgattaccttgttcctagagaagtttacttcagattatgctaatgtggttatacagagtcacttagattttttggaacaaatcttaaaccttatacagtgactacgttttaattaaaagagaggtagacatagcttcatttaaagatgagtattatatttcattctaacattttcatgtgtatttcattttaagagtactgctcagcttagatctttagaagataatcttaaaaataaagaaaaaacaaaaaagtactgctgagttgataatataaattgttatattggagatacttagaaataattggatactttgaataattatactataataatatttcagagttaaccgtaaaaagataaagatccctttttttttcctctttgcttatgaaagtttaggtggtttttaaagaagttttaaatatttgtaaatcattttaacttgccattgtttttgtttccctgtaattatctttcttgggttctttgccttaactttggccctaaaatagtaataattggtgagagttttgagtttggagaggataaagaaattgtcacggtgcagactcttgagataaatcaatattgttaagaaacttgaatgagagctcacagtctgtttagggcttttattctcagtagagtttttctctggacctccggtaaaaggcattccagttaacctaaagagaaaaactacattgtcagaatcttaactatatgttgcaaaattatattctgtatgatgccagcttaggtgggtagttcctacagtacaggaagcttaacaatctctaggattaaaagataaaagaatgcctcaggctcatttatctttagtacttcatggtttaaaaaaaaaaatgagggcatggggaagtgtaaatggcaatgttgtggcagtaattgctaaaaaaaaatcagattataataaattttaatgatagagtctctggactcagctatcaaggataatcattacagatttggggacattgttgcccatggtgtggcatattaaagaacaaaataactccattagtttgacctttctgtgaacatttgctacttttgcaatggaatcatgcaagtatataaaattgcttttattacagacatctytgtattccacctgcctttttttattttccatttgcagtctgttcagttcaggaagctgctataacacttggtgccagtgttcccaaactctaaataatgtgttttccatttgcactaaccatcaggaaactagaatttctggtttcctcaggtatgtgtagtggtcattagtgttacgtgaaagtctcatagcatttgattataacataaggtatttagaaaaagaaagttttctgttttaagttagctctcatgttcttttgtattctatatgaatcaagtaaatgctttagggatattaacctggaaaaattattgactttgtaagttcacaattcatgtaaagaaatttttataaaatatgggagaatttaaacatttgacaggaagagaacaactttttaaatttgagatatattgagttcagagaggttagtgatagctggaaattttattcgccctagtaattattttgtttacattaaaaaatctgtaataaagctacaaaatagtaaacagattactgtaacgtacttggtacatatgagtggcagagcaactgaaatgtccaaaattggagaattagcagactcttgttcttacctacttatagagccattgcacttttttggtaccacacagtgataatgttttactttgaactacaaaaatcgcaatgcagataatgctgctggaaaattaaaaatagatattaaaaagacttctaagtacttaaatattctctaagggaaaagctctaaaattgttgacatttctttacttgttctatgaatactgaagtgttacatttcttaactaatgtttgctccaataactaggcactggacattatagctctatgcatggattaaaagaagaagtgtcgtttcccaaacataaaacagaatttgctacttgtgtgctgttggggattcatgattattctgtccatagagagggtactttttcagaaatccggaaatagtatggaaccctcaaataaataagcagctgaggagtttggtgttacggagtgtgttgtatttttacaggtgccactgattaatgaacttgaatcagcaatacatcagctgtacaaacagcgagcttcccgccttgtccaaagacgacaagatgatattaaagatgaatcttcggagttttcaagccattcaagtcagtccatcttgaaggtttttattattcattaaacaaccttgkttacttagtgcagcctaattgaaaattagagatcttggagctttttttttttttttaaagaaacaatttccttgctgttgtgtcaggtagatctaaaaatggtaacagcatgtacttgaattgtgtttaagaaaatagagcttcacaaaggagctcaaaaacgtgctaagattctgtcagtcttcttattctttgggcatattttttcattctcctttagagtatagaaaagacattatccgtattttatgttaaaaccattatctgtttggccctaattggttttttcccccattttcattcaaaacaccaatacaaataaatgcttttgttgatcacagtgaaagagtttgagtttagggactgggacatgttgtgggtagggggagggaagctataacttaacaaatgacacaactccaagataggasagttttgagcttcatcctttggataaagcaaactttttgtaatttctttttaaatgtttctctagtttgctttatgtactgtgttttttagtaagtcagttggtgcttacaattcttgaaattttgtatacaaatggatagaaattgaatttgtacttccatcattatgacatgtgttatggaaaaccagaattagaaacctcttgttaaatagttcagcggaggtcctttaactggatgttttaaaccgtttagttcctttttttccgttaccctccatattcttgagtgcgctaataggaattttcctagtgtgaattccttgtggtttcttttgtcatttctttgttccctttgtcagcatttctcaaatggaagtgtgcatcacaattacctgatactcgtttaacatacagattttctggttctatccccagtgattcttactaggtcttcagcatccagaaatttgcatgttaaacaatctctccaggtgatcaaatgcaaatagctctaatgttattctttcagaaagcaatgctttgctatacatggtctctaagtcagagagacataggatccctgaaaaagcatcctcctatatgtcagatgggttttggagaggcataaacagatggtaatacggccctcatagctgaggtagtctcagctatgagccctataaatggctatgaccttctgtttttgccactgaattttaaattggattattgacattagccacctacatgactcatgcatccctcccagatcacttttgatccagacagaaccagatttctggggcagattacaggtaaccattatactacaaagggaggtaattttcttttaagttagatggtttgtgtgagctgtacatttcatcaaataccttttcccatctgtaatttgttcttgagaatatggagctatttacttagaggggatttgaaagaagagttgaattatttatattagtttgattgaaagttggaaagaaattaaaagatactgggaaagtgaaaaatacagtcctagagggagtatacattaattgccaaagatttgaggaaaatgacatgggatgctggagaatcaattcattttctgatctgttttttaaagaagtaaagaatagtctgaaattcttctgtttagatttataagcacttatctgcaattactgtgtataattcttacagaaatggaggaggctatcacttgagtcatgttagactcacctgtctcctccagtgcacattttacaaaacctatacatgcagtgatgttttaagtataatgttttttttttttttttttttttgagacggagtctcgctttgttgcccaggctggagtgcaatggcgcaatctcggctcaccgccacctccgcctcccgggttcaagcaattctcctgcctcagctacgcctggctgatttttgtattttttttagtagagacggggtttcaccatgttggtcaggctggtcttgaactcctgacctcgtgatccaccagcctcagcctcccaaagtgctgggattacaggcgtgagccaccgtgcccagccgtataatgatatttttaaaaatatttcttgaaggaaaactcttgagtctggaattatttttatagtttgggatattttagctaattcatctggggtgtgtagtgaactcacatctagggctgggaaatctttctggtttagtaatttttcattgtaattgatgcactcrggaacatacctccttcctaatttcagagctattttgaaatatgaatgaaaaactcagtaaaaaaaaaagtcaacttttaaaaatagtagggtctggtcaggcacggtggctctcgcctgtaatcccagcactttgagaggccgaggcggagtttgagaccagcttggccaacatggcaaaaccccgtctctaaaaatacaaaaattagctggtggcgggtgcctgtaatcccagctactcaggaggaggctgaggcgggagaatcgcttgaacctgggcggcggaggttgcagtgaactgaggttgtgccattgcactccattctgggcgacaagagcaagactccgtctcaataaataaatagatagatagatagtaaggtctgatarttaggatattctgaagtaagagctaaattttggttttgtttttcctgttgctgattttggtgacacatctctgttgatatcagtaaatatcaattgataagtaaaaaaatatgcaagtcttaacttggatgtctttcatcttgcatgtgctcacctccctcccctctcacccagtcgtttgggttgtttgcctccccttactgtcatatcttcatagtgtggaactaaaacgtagaaatgagggaagtatagtggacagatgtttcccccaccccttcttttacctaggcaagagattaggggagtcttttttgattaaagagagtaggtccaaaataaagacyctgaaacactaaaatctggggatccccaacaaaagaactggctcagtacctagtgatccgacggagacacctctgttagacagctcctgcccacacacacagcttccagtcttgctcttctatatgaacaggcagttaacgatgatcataaggaccaacctgagcagcagaaccaaagggactgaggaaacagacagtgctggtacaagtatgcaagttttctgtaaacagattactttcaaacagttgggagccccagggagataatagaaggtatcctactcaacagsagtatatagaatgctgtagaagaggaatattgtaagaacaagaactatctcttgaaaactaaaaatatgataactgaaatataaatttaaataggattggaagctaaagctaggaaattaccctagaatgttttttgagaaatggaaaatacgaagaccaaaaaaataaaataaaactatgctgtgaaagagaaagattagcatttgagaaggcggaagttggtcctgctcagatgcggttttcagatgccttattctaaaaatagtgatagaaaacaaatttctacaaagcaaaattacaataaatttattaaactcttgcaacaaagctgttttcttatgtcttcctatgttttcctgctgtcattcaatgtgatgctgaagttcttcctccttaaaaatgtaatatttttccctttgcacaggtaatttagagttttaatttatttggtcatcatgatagctattcctgatagctgtcctgttacttagacataaaaatagtgagtaagcccaattacatatttgtagggttgttgaactcttaaaaagaaatcacttctttaatttttctactttttaaaatgggaacgcagaataataatgaaatttgttctaaaccaaaaacctacctggtttaccagttattgcagaatcttgccgttgagattagcaagcagtctgtcgtaatggcttattctgtgcaaactctttcctcaagattgttgaaagatggcttttaattttaactgttgttgttttgcagacaaagctctgatggcaccaaatcttgactcctttggacgcgatcgggcactgtatcaagagcatgcaaaacgtcgcattgcagagcgggaggccaggaggtaattctcaaaacccttgctctggcttgtttgggaagggaggagtctctgttatctagtttgggaacttgatgtttattatttaggactcgtcgtagacaagccagagaacaaaccggtaagatggcagatcaccttgaaggcctttccagtgatgatgaagaaacttctacagatattactaatttcaatctggaaaaaggttagacatttatttggaaataagactcatcatcagtttagtttctacttgggtatggtttttaccatgaaatgatttgaatcttcatggtctctgcattagaaccagacacttcttttttaattgcagaaatttgcatgcctttttattagtgaatatcatgatgaattctcaaaaataggggtaacatcttctcatagggtgtacttagtatttgcataataaatgttgttactgttccaaatggtagaattttaagtgactggaaatgtgtcaggtccttgagggcagctctcattgcagcctgtctggtctggaaaggtaaagcttggcagtagagcactcagccctgaaggaaactcttgatttggggagtcataagtaatctcaccttagaggaatggttagtactattatgtgccaggcattttcagaaggatcccaaataaaagtcttcatttcccaccattggctataattgtttggaattatatcaattgcacaccatttggaacttagttggagaagcttctttctcttactttttttacagtgaacatttctaaacaaaatttgaaagactagcacagtgatcatccacatacctatcactcagataacaatgcttatgatttcaccaagtttgcctggctctttatacaaggagatgtgtgtgtttgctgaaccatttgaaagtaacttacagacctcatggctcttcactccccaaaatttcagagtgtgtttcctctaaatgagtatatttttctgtataatcacagtattattatcttttttctttttgttagatgcctattctgattaagtatttctttttttagcacaataagaaaacagatttcttaatatcatgtccatatataatttttctcaatggcatcctggaaaaaccctttttaggaactatttttatgggttattttgtggtttttgaaaccaggatccacctaaggttcatgctctgcatttggttatgacatttttaaatctggaataaatgagtaaccctaagtacacattcacacacccacccctattgttctttaaatttttgaagagaccaggccacttctcttatagactgtcctatattctagactggtctgtatgtttcctcatagcattgtttaacttgttctttgatccatttcttgtaaactggaatttaggtctgaaggcttaattagatttaagttaaactttttttttttcttccccaagaataatttatacaggatgctgtttcatactgcttaaaagcacatgacaaatgttagactgtccccactattagcaatgttaagattgatcttgcagtaaaggttctcagaactttatctctccattgtaaatatttccttttcccaagtaatctgggacatcataagagtatcttattcttggttgggcacagtggctcacacctgtaatcccagcactttgggaggccgaggcagcggaccacttgaagtcaggaattcgagaccagcctggctcacatgatgaaactccatctctactaaaaatacaaaaattagttgggcatggtggcgcatacctgtaatcccagctactcaggaggctgaggcaggagaatcacttgaacctgggaggcagagattgcagtgagctgagatcgcaccacttcactccagcctgggtgacagagtgagaatctgtctcaaaaaaaaaaaaaaaatcttattcgcaaataacttttcacttaaagttcctagcatccattcagctgatagttggctatgtcagttattataatcaccaacagagtttgaatgaagcaatgtgattagtgactgattatgatgcacagctgttaatctgtgcagtgatctgtgaactaaaaagctagcggcacaattacttatggctaatacaccgtagtaactgaaatttgaaccatcttgtttgggaacaggttttatttagccaaactgtggtagaaaaattgtatatactggaactgcaaaacaaggactggctgcactttagtttacataatagacaaattgaaacttcaatttatttttttcttctaaattgtgactaacaattggccctttgttaatgagcgtatcttctgatactgaagctacaaagaaaacactgaaaatattggactgtttttttcctacttcatactaatrtatggttctctgtggggttttgttgtttttagatcgaatttcaaaagaatccggcaaagtttttgaagatgtccttgaaagtttctattcaattgactgtattaaatcacagtttgaagcatggcgttcaaaatactacacatcctacraagatgcttacattggcctttgtttgccaaaattattcaaccccctcatacgacttcagctcctcacttggactcctcttgaggtgagtggcttctgtcactattagaaagtgttataatttgatatctgggtaattttaatctcaaagctagagatgtaagcttaagcaaaatattttgcaggggtgatagggcataggctataattgatagattgtatctggttataatcttatgatctttccttttaagtttcatgtcttcccagcagagctatgtgttttttttgttgttgttgttgttttttcagtttacatataatccttttttcagccagctgaaattatatgcagtaacactgggatatgaacatgaatagtaagaacttggtcctttgatcctagaggaactcagaaccagatgggaaagcacaatgaggcaggtgtgaaatgaggacatgacccaagtcagttgtcatggtgagaaaaattgataggccaggcatggtggctcatgcttgtaatcccaacagtttgggaggccaaggcgggaggattgtttgagctcaggagttcaagaccagcctgggcaacatagcaagaccttgtctctacttaaaaaaaaaaaaaaaaaattagctgtggtggcatgtgctcatattcctagctacttcgggggctgaggcaggattgcttgagcccgggagatcaaggctgtaatgagctatgattgtgccactgcactgcagcctgggtgatagaacaagacctgccacaagaaaaaaaaaaaaagataaggaggtggaatcaagaggacctattggcctgtcatataagggagggggctagaattgactctggaggtctagtggtgatgtttacaatgtggttttagaagttaccaacgtgggtgaagctgtagacatggttgagattggctaggttgaatttgtgaactataaggaaaagggagctgaggttgatgccatggaaacacaactgaaaaaaatgtgagctctgagaagcattcagctcacagctcctatttcctgtgtgctcttggccagaccttctgaagttttgctgtgtgcatgagtgtcttggtagatagcaaaggcccaagactgtattttggagttatttttctgtgtcccccactcctctgccccacagtttccagctgtgtcagccttcctgagctccaccctctgtctcctccactcagcaaaactgctctgctgtcctgaactagcatctcacctcatttgattcctttctttaaagggtcatagtcttgtgctgcctatggtccattgtattttgtccagttcttttttattttctttggcttttaagttccagggtacatgtgcagatttgttacataggtaaacatgtgacatggtggtttacagcacagatcaacccatcaccttggtaggaagcctagcatccagtagctgttgttgctctccctcccccaagtccccacccccaccccccaacaggcctcagtgtgtgtttttccccagtatgtgtccatatattctcattgttcagctcccacttgcgagaacatgtggtgcttgggtttctgttcctgcgttagtttgctgaggataatggcttctagctccatccatgtccctgcaaaggacatgacctcgttcctttttatggctgcatagtattccatggtgtatatgtataacattttctttatccagtctataattgatgggcatttgggttgattccatgtctttgctattgtgaatagtgctgcagtgaacatacatatgcatgtagctttataatagaatgatttatatttctgtaggtatatacccagtaatgggattgctgggtcaaatggcatttctgcttctagatctgtgaggaattggcacactgtcttccttacactcccaccaatagtgtaaaagtgttcctttttctctgaaaccttaccagcatcttttgtttctggacttttaaataattcccattctgattggcatgggatggtatctcattgtggtttagatttgcatttctccaatcatcggtgatgttgagctttttttcatgtttgttggctacatgaatgtcttcttttgagaagtatctgttcatgtcctttgcccacttttaatggggttgtttttttcctataaagtttcctgtagactctggatattagacctttgtcagatggatagattgcaagaattttctcccattctgtaggttgtctgttcactctgataatagtttcttttgctgcgtagaagctctttagttgaattagataccatttgtcaatttttgcttttgttgcagttgcttttggtgtttttgtcgtgaaatctttgcccatgccgatgtcttgaatggtattgcctagattttcttctaggatttttatagttttggggtttacatttaagtctttaatccatcttgacttaacttttgtatatggtgtaaggaaggagcccagtttcaattttctgtatatggctagccaattctcccaacaccatttattaaacagggaatcttttccccattgcttgttcgtgtcaggtttgtcggagatcagatggttgtaggtgtgcggtcttattgctgagttctctattctgttccattggtctatgtgtctgtttttgtatcagtaccatgctgttttggttactgtggccttatagtttgaagtctggtagcatgatatctccagccgtccagtttttagttgtttgcaaccaaaggttaaatccagttcttgtttctcttatcatagctggaagcagaaatagccactrttttagtatttgggtaaccttttaawtgtcttttaggcaaaatgtcgtgactttgagaatatgctgtggtttgaatctttgctgttttatggttgtgaagaacgagagcaagaaaaagatgatgtagatgttgccctactacctaccattgtggaaaaggtgattcttcctaaactaacaggtaaatctcctgktctctgaattgagcattcagacacactggctttctcaaatctatttttatgagtttataattcagagcatgtttccttatagaaattacatgagaaataatagttaccacctggcccagagatggctagagggcagaggggttcttatcctgggacttgaagaccactttagggtgggcctgtagttgagtgcagtaattgcttcataggtgaggtttagaaattcaaagactgactgaagcaaaattatacagagtttgagggaggaggatatgcatttatgtggggagcaattaaaatgctttcataagttcctcaaaaaagattaggaatcattgatacaggaatctattttaaatactagaaatgttagtttgaaattcttgatgccaagacaacatttctacagaaatcctcttttttcctaatctttattttccctgagtaccagaaataagaataatctatcctctctccacatccctatccctccaaattcccacagttaataggacaaagaagactaaagcttatattgtagaaaaagaggaaaaataaattaggattggcattaatagaggtctgcttgacaaaaaattaaaggkacaattggcttctgtgtctcaatcctctttttttcttaatagtgatagctgaaaatatgtgggaccctttttctacaacacagacttcaagaatggkgggaattacactaaaattaatcaatggatatccttcagtagtgaatgcagaaaataaaaatacacaggkaatttagtatcttttgaagccttttttttttttcctctttctgttgaatatgagcaagcattgagagaatgagtggttatcctaaaccaatcagaaatctggttctcccacttgggccatcagggccattaaagcctgaaatacacaaaatttgagatgttaggttttttttttcttttttttatacctagtcccrcagagagatgttagttttcagtttaaaaaaatcaatatggaaggaagatgtcatcattttaaatagcctttcattatgatttctcaccaccacacctcagtcccaatccaactaatcaaatgtccttttaaagactgtattttctggggggaaatgagaaaccaaaatgttaacaattgataatttaagcttgtccaacccgtggcccatggacatgtggcccaggacggctttgaatgcggcccaacacaaatttgtaaactgtcttaatacatgaaatttatgcacagaccccgcccccctcctttttttttttcttttttttttttttttagctcatcagctgtcawtagtgtcattgtattttatgtgtggcccaagacagttcttccagtatggcccagggaagccaaaagattgggcacccaaaccatttaaacagcatataaaacaactagatactgttttataactagttgccaaacttaaagttaatgctcttcaggggccattcatagaagctgtttaaatgtagagaaggtgggtgctctttgtcattgttgaattttcactttgagagctagattatgtgtctggtcttaaatctttatgtagactaaggaattgaaagatttctaaagctttattgcttggcagttgttgaggaatgaactaatagattattaagtattaattactttagggtcttcaatgaggaaaattaaaaatttgagaaactagttcactcagttcaatattyagttacatgatttggaatatggcttatttttcttgtcatagtccttattaaaatgtgtgatctacttttaactttttaggtatacctaaaggcacttttattgagaatgagaagaactttagatgatgatgtatttatgcccttatatcccaaaaagtaagtaactctgaagaacattaaagataatattctccattgtgtttcagagaaggsttataaaattctgaaaaactagcttgaaatacaaacttcacccatgtagtgtattacagagagactagattagtggcgagattgttcccttaagcagaataaaacaatactcttacgttctccctgagtgtctcagaataaatttccattgcctttttaacatactatcttccagaatgcaattatttgaaaaattaaaaatttattttgtttacctgttttgtagaaaaatcttttgtccaggaatcatatggcacctacatataaaatatctgatcatgatatgtttctcttttttttacttagtgtcttagaaaataaaaattctgggccttacttgttttttcaacgacagttttggtcttcagttaaggtacgtgtccatagactatctaaaagactcagatttcgtttgacttcatatattacattttttagagtgttttgttttttattaactccataggcttagatctrtttatatctatacccaaaatctccattttacaaagtattttattccaaaagttcattcaagtttgatattttcacaggagaaagtgatttctgagttccaaagtaaggtccatcgtactcaacgaaatgcctgactaagccacaattaattttttcagcaagtagactacagtagtcctccctgtatccatggggtatatgttctaagatgcccagtggctacctgaaaccacagatagtaccgaaccctatatatactgttttttcctctacatacatacctatgataaagtttaacttataaattaggcacagtaagagattaacaataactaataatagaacagttattaataatatactgtggtaaaggttatatgaatgtagtttctctctcaaaatatgttattgtactgtgccacagctgactgaaaccacagataaggagtactgctgtagcagatactcttctgaggttcggggatatagcactgagtaagctagaagtggaatctttgtggagttcacagtccagcacagttgacaacaaataggtaatctcaggtgtgatgagttatgaaaggggacattcaaggtaatgtggaacatatgacaaggggcacagagaccttgactagctagtcccagaagatttccttccaccctgaggaagtgatatttagatcattcgacctggagaaaaaatagaagttagccctgaggtgaaagagagcaggctacactggaggcgctgaagaaagcataggacagctggagtgagcaagtaagtccatagtccagatgatagaggatcttgtaggtcatttgaaatactttggtccttatcccaaaagttgtaggaagtcacaggaagattttttccttaaaaaaaaaataaaaggtataatttacatacggtaaaattcactctttttagtgtatagttctgtaaattctgatgagcagatacagccatgttatcactaccaaaatcaagatatgtacaacttttattgtcctgagaaattccccattctcttttgtagtcaaggtcaccacaagcccctggccacctcccagtctatgtcctatgaagagaagggaattacatgataggcaaagtcttttgagtctggctgcttccactgaataaatttgaggttcagccttgctgtgtaggtgcaccagagttaggttttggttttcatttagtccctaattaagggacatttggattgtttctcttgggactcagaaaacaataccataaaatgaaggcctcagaaacagccttagaagaactttttctttgaccttctcctgcccaccttycagtcctgttctcccttgagggttgccatagaaactagaatccctgttgccccaggcgggtcatagacaccagaaccccttttccgcaaagccaaccataaaacctaaatatattactcttaattttgcctctgcctttctgtgtaaaaactggccataaaacatctgacctaccttgtttgattataggtcataaaacccccattccagagagggtcctgccccatacccagaaggaaagaatgctgctcagagaggccaagaagaatctggacggacaggccttgtgttgtcttctcttgagcagtagatcatacctttttgtccagtcatgtttctgcatgcctgtacatatttcgttaaacctaaacatagtagacaatttctcctccatctttgggtcttcattctgaaggctgtcatgttacataaaactgtgatcaaataaatttatatgccttttctcctgttaatttgcctcttgtcagtaattttcagcgaaacttcatagggcaaaggggaagccttcccttggccccgacatttccaatttggttatgaacagaccttctataagggtgtaagagcttctataagggtgttctgaatatgtaagtttcatttcatttgggtgaaacagccgggcaaagctgtcttctgaagtggctgtataattttgcgttcttaccagtaacctattactgtcctggttattccttactcccaccatacttgctgttgtcagtgttttgctttttaagtcattctacagggtgcaatgtggtatctcattgtggttttcatttgcatttccctaatgacagtgttgaggacgttttcatgtgcttatttggaatttgtttatgtattttggtgaaatgtcttcaaatcttttgcttaggttttaaattgggctttattcttactaagcattgaattctatattctggagagaagtcgtttatcatataaatgatttgcagatttttttttttcagtttgtggcttatctttccattctaatagtcttccatatgcagaagttcttaattttgatgaagtccagttgatctttttttcctgttatggattgtgctttagatgtcatatctaagaaatctttgcctaatatgaagccacaaaggttttctcctatcctttcttctagaagtttcatagttttaggttttacatttaggtctgtgactcttttcaggttaatttttattatagggtgtgaggcctggattaaggtttacttgttccagcactatttgttgaaaaggcgatagccttttctgtgaacaccaaaaattcctttgtcctatgaacaccaaaaatttgagacaggtctcagttaatttagaaagtttattttgccaagattgaggacacacctgtgacacagccttaggaagttctgatgacatgtgcccaaggtggtyggggcacagcttggttttatayattttagggagacacgagacatcaatcaatatgtaagaaatacattagttccatccagaaaggtggagacagctcaaagcaaggcccccccattggggacttccaggtcacatgtaggtgagagagggatggttgcattctttggagtttctgataagtttttccagaagaggcaatcagaatatgcatctatctctgtgagctgagagatgactttgaatagaatgggaggcagatttgccctcagcggggtccccagcttgaagaggcccaagatatttccctttcacagtccattgaattgcttttgtgcctttgttgaaaaccagttaactatatgtgtcatggaagggtttaaggtaagtaaacaaattgcctttttttttttttttttttttttttttttaaagagacgaggtcttgtgttgcctaggctggtctcaaactcctgagctcaagtggtcctccttccttggcctcccaaagtactgggattacaggtataagccactgtgcccagccataaattgcctggctcagccttccgagtagctgggactacaggcgcccaccaccacgcccggctacttttttgtatttttagtagagacggkgtttcatcatgttagccaggatggtctcgatctcctgacctcgtgatctgcccgcctcagcctcccaaagtgctgggattacaggtgtgagccaccgcgcccggccgtaaccacaggtctataaattaccatttttaagattactctgtctgctatgtggagataatagattgaagtaggtatggatagtgatagtgaaaatgggaactggtatttattgtgtattttatgggaactagtacttactgtgtgtttactatgtaccaagcactgtcccgcaccttttacatagattatcttgttgaatcctcagaatggctcaatgaggtacacgctgttttttcactttactgatggggtagtgaggcacacaataacctgcacaaggtcattccattggtaattagagatgggaatcaaactcagccagtctgactcttgagctgctcttctcaactgggcttctgtgggagacttaatacctaatgccctaaggcctccattgtctataatgaattcttctttttcccctgcatctgtaacagtactagctatgtatcattcttgggagaactgagtaaagagccacacaaatcattttctgtaggtttagaactcttgcagagccctgcttcagaaaggctactcagtgctcttgctcataatcactggagtaactgcagggttctgaagagattaaggtgggtcagattcggaggatggcagcaggaactgagggaaatggacagactggatggtcgtggagacacacaacttgagagagaggtcaggaatgacctccagacctctgscgcaagcagctggttgaatagtgttaccatttactaagttgagaaacaactgggaaactataagtttttatggtgggatgggatggggctttcattttatgatgatagctttcattttctatatattgattgagcttgggtagcttgagatgcataagtgatataacttggttgtagttcatgatacatggtagccatgcagggttgtagtcagactctcccatcttttgtgggcagcgcggggcggggtgggggtgtgcatagaaccagctagagtgtaattttgaatggaggacacttacctaagactcagcactccctgatagtactgtctgcaatgatggaaaatgttctgtatctgtgctgaccagtgctgtagccactagctacatgtggctgtttcgattttgactaattaaaattgaatattcaaatgtaaccattctaggaaatatctgtacctttgaaagtattaatatttcttagtactttggcaagacatggtctgctgtatttcatatggtgttttactatgtaacttatttactttgtacctaatctaattgtttcacattacctattttttttcttctttccagctgttaggcaattttcttcagtggtatggcattttctcaaataaaactctgcaagagttatcaatagatggtttattaaatcgatatattctcatggcttttcagaattcagaatatggagatgacagcatcaaaaaagcccaaaatgtgagttaaatgcatagtacagtttttaaagcatataatttaaaatgaattaagtttttgtttgtttgaagagggatttgagaattttatgaaacccctttgattactggacttgcatgtaaggttgacagtttgcctacccaggtagttccaaccccctacagcattttttacataaaaatgcatactgttatatatatatatatccatctatatccatatttttatagatattagtgaaagttttgatatttttataggtataaataaaagttttgatttcagaataataaccttattatcttaacctcagtctgggccaactcgacttcccttagcagcatgcatggatgtctattcgtggaattattgcaggggatgggggtgctgtaatttcatttttataccactcatttttacatcaaaagctgctggaaaaggaaattcagtatatttaggccatcctagaagactggaaaatgaagcagttggttgtcagttttatgttactaatttactcaaatattggacagattatcttttgctttgagtgcctaacccattggttggggtaaaaatttaggtatattggtttagttaatgtaggaagtcagatttaaaagaatatttcttcagagtaattgctgtagctcagaagcacgtcttctggtgaaatacatttatacccattaactagactttgcttttaatactttaatttattctgtcttaactattttattttacgtctttcttctccacaggtaatcaattgtttccccaaacaatggttcatgaatctgaaaggagaaaggactatttctcagttagaaaacttttgccgataccttgtacacttagcggatacaatttatagaaatagtatcgggtgttctgatgtggaaaaaagaaatgcaaggtaattttgtaattaatgaaatggtaatctagagttgtttagttgccagatttagtattaaaatgttttaagtagagatgtttatattttagtttaaattgtatgttcacttagtattataaacctaccaaaaatgcacataatttttcattttagcagtttttactttttttcagtatgttatttatgaagatactaaggaaagacttctggtaaggaccaaccctcaggggagtgagtaaacggttgttttctctgtctccctctttgaagaattagagaggtctcagactctcttgtttggagtttcattatgcagatttaaattcaagtttatctcccaatttggggagattttttgttttaatcaatattatgaactagaggttatcactcatggctttttggggcaacttatttctaatttttatcaagggttgtaagaaaagagtgagtgaaccattagcctttctgtggacattaatttatgggtgttcaggtaattctgggataaatctctagcataaaaagtaaataataacactaagtagggcagtttgaaggaattgtctttttaaaattttaatttcatatatcttcataatgtcaaagtctaatttttgtttagatcacaccattagtcatacccctataacaaaaccttcttctgatccctcattcccctttcttgaaaaaggacctattttcctgcaagaaaattggatattttttccacaataaaattaaagtagctattaaagattttaggccaggcatggtggctcatgcctgtaawcccagtactttgggaggctgaggcaggtggatcatgaggtcaggagatggagaccatcctggccaacatggtgaaaccctgtttctactaaaaatacaaaaattagctgggtgtggtggtgcgtgcctatagtcccacctactcgggaggctgaggcaggggaattgcttgaacctgggaggcagaggttgcagtgagctgagattgcgccactgcattccagcctggtgaaagaccaacactccgtctcaaaaaacaacaacaaaaaagattttaatggtaaaattctttggcaggttttggctgatttgattttgttcttagtgtgtgccattttgttatttgttggcactaatatttttttctctgtgttttctactagataaattttatcacattttaaactttgatttacatatatttaacagtgtttctgtttggaagttaaatatcaacaaatagtgtttacttttctacagaaaagaactttaacagctatgtaagcacctgctttgtgcagtgcacataaagcaggtttcatgtgggttggaaagttttgcaaattctaattcttccctaataggtgcttactacaattctgtagaagagatgagacaattactaatgtcatattatgtcttgtttctcgtgagtggtttaagctaaatgttaaaacagtcattcttaaagtgtggtccctggaccagcagtatcagcatggcatgggagtctgatagacttgcaagttctcggggccccactctgggcctcttgaatagaactcttggggtggggccagggatgatctgcatttcaacaatcctctaggtaattctaatgtgtgctaaaatttgaggattacttcctagtaagaaagcagaatgacttctagctggagtgataaggaaagtcagattatactttatttagtgaattttggtggagtggaaattatgctggatcttgacagattggtgatgaagagacacaaataacgatttgtgttccaggtatacgctaaaacagccaggactctggtttgggaaggaatgggagacaggcctctgaagtagtttgaaaacagattgctttcttttctttctcaatattaatgaaactcattgatctcaatgaattttgttttgcttttttaaaatgggtcccctgtctctgggctagtcatttaaacmtatgtaagttttgttctatatggataaatgkaaacttttttttttttaacatgctgtagcttgcatatctgtttcctttctttgaaaatgtgtgcttggaaaaattgattgcagaagctctaaaatagccatgaaatcagtagcaaattttctcttagatatactaattaatgagatgctgctatatttttttcttttagggaaaacataaaacagatagtaaaactccttgcaagtgttcgagctttggatcatgctatgtctgttgcaagtgaccacaatgtgaaagaatttaagtctttgatcgaaggaaaatagatctatgagactgaaaaacctatttgcttgattaccattcccaatgtgtaaattttgtatatatgtaaagtttcttaaactgtaaaatagcaattcttgttttaatacaaaaaacattatattcaatactgtgtccttaaatgatatttcttcagaatgaaaggaattcagattatttctaggagtctatgaatgttttctttactgcctgtcatactttgtttactgaagtattttgtatggtcatttaaattaaccctctcagttaattgtcccctgtaaacgatgtgtgcagtgtaaattgtgtaattatgcatatatatatttataccaccatggacttactttcacactggaaatttgtggtgtttttccacagaggaagccttttaacagcagaaaattatccggtagcaaattgtcttagggaaattactacactgttgtaacaaaagggctggcaagtgactaaatgttcattaccttttggttagcgttgctatcactgtagctgtgctgccttaacattgagagttgagttgtggacttagtcattgagtgaatgttgaactttcttccttgaatcagcgttagagtcaaatgtgggtttaatgtgaatgctaaatgaatatgcaacatagtttcaaatggaacatagaaatttcacttttgaaaataataaacccacaacctaattgcatggttttgggctgaccgtcctgtctcattcatgattttactccctgcccagcttgcagatacatgcatttgaattttagtagtctgtcatatttaaaatcccacatatgtgakttaaatatgcaataaagaatacgccttgctgattagccacacccaggcaatttaatatccatggtcttctataatgtttataccacattgtaaatattcagagaacttgttttaaagtttatgctttctgattctgtgattttcaaaagaggaatttttttggaaattaaggactatcgtttgataattatatatgtaattaagatttagccaagcattaaattaatttttaaatatatcctttgttgtattttcctgacgactaaatttgcagcatttcaaatgactctaataaagtgggactgtgagcaggcccatgtgtacccttgatcaggacataatatgcagaacagtgtcatgcactgtatttgctctgttaattttatcttatccctacatatttgtattagttcattctcacgctgttatagggacatacttgagactaggtaatttataaagaggtttaattgactcacagttccgcatgggtgggaaggcctcaggaaacttacaatcttgacgaaaggcacgtcttcacagggtggctgcagagagaaatgagtgctgagggaagggggaagtcccttatgaagccatgagatttcatgagaactcaggagaacagcatggcggaaaccaccccccatgattcagttatctccacctggtcccgcccttgatgtggggattattacaattcaaggtgagatttgggtggggacacagaaccaaaccaaatcagtattcattctggatgaatttttcattacaccttactggcctactaagtagaattaaagtcagaacacctattcctcatcttaagtagaataaaacataaaacatgtatctgtatcacatacagatcatttaggccttaaactgcatattatttccaaacccattagactaattactctgcttttaagaactcttaaaatagagtttttatcctatgaaatctgtcaggctatattggtttcaggaatgggtttgaacatcacactaggaatttgatgtagggtacataaaacaatggtttttctatcccaagcagaacatttttattcctgaaatagcttaaggacattatttcttatgaaaggaattatcaaaagataaatccagagggttacattttaataaagctggttttgcttttcagttttttcttttggagcaatcctctgaattaactccaaaataggtgacaaatgtttttgagaaggaaagctactttattgaaacaacataaaccacagtcaagagtgactagtactactgtagccaatgatgtcgaagtctcaccatgtccctgttcttgccactggtgtcctcttgcaagtatttgctcctctgcctgagggcttttctttggcctgtgcaacaggctggagtgtcctggagatacttcctggaacagatctcagccaagggagaaaaggaattggaggctaaatgccccagtgtgtcagttagggtcctcctgggagcagacactgagatggtattaaatgtacaggaagtttattgggggaatgcgtataagagaaaacggaggggagcctggaggaggctgggaaagctgtcagacaatgaggcaggcaggtctcacctgtgtgaaggaaggaggatgaaagtcttagacatyggtgcagttctaaagtttcagcagggccaactggcagctctgacaggtacaaccaggggtctccttgctagtatgagatctgagagacagaatttcctgatgaccaaacccaatttgctgatctctcaggaaagcaggtatggtccacattgcctataagaggtcttcagttgagtagagccatagttgcctgcagtggtaacattaccagcacccagaattggccaaaaaattgaaaatgctaataatcatccttgaaatcatgaaactcttacaaaagtrgtcaaatgttacagagctgcaatataaaataggaaactgtaagttgctacattgtagtggttgttaatggttacaagagctcttcttatctctaacatggtaatacccatgtaataaagggagtcttgccattcactgattatgacaaaacatttgatctgttgtttcaagtaaatgaaaatgagaaaaacactagcactacatgtaggaagaaaaaaacatatctgaatgggaggtgtactttcataaacgttttgaagactgccctccagaaatgaaactgtccatggatactgggttcacagctgctaaaagctgcctcagactgcccaaacacaggctgaatattgttatatgggattggtatcgacatgcaatgtagactggtccctggcctgctttgggactctagcccccagtaatttgtactgcgttcctgtcagtcctaactccagcagcggcttaaaggatacaatcattcagtacaatgaaaatccctagcacatgacttcttaggctcttgctaaatatctttaggaaaatgtatgagaaaagttttgacaaaacactgcagaaaccattttaagctactttgcaaaaacattttgatcatgaaagcttaccttttacttgtaaccttagtgacattgctgttgctttgggaccgagagccaacttgaacaacttgaatacagctctaatcttgaaggttgagccctgtttctggctccggcactttgatttccacaagaatctttgtgtttcattaaaataaacccccttcacttgatctctcttcagttggtctcttgttccaaatgaaaatacttcatttttatctatcacaagtttcctgttttctctagtggcaatttcctgtctatgatacctgcaagttatttttcaatctgttttttttccacagtgattctgctctcaagcttactagttttttattcataggatttccatttttctaatttaaaatcttatccttcactggttacaatgaatttctttaaagaaaaagctaatgctatttgtaacctactgttgcgttgcctttcaagaccactgttttctgttcgagccatttctttctcagtcattggtggggaacatggccaggtacaactagggtctgcagatcctgctatactaggaccaggatctgcagagcactatactaataactctgcagatcctgatcctgatataaaagttagcttagcctgtgtaacctgaaaagaagctgttaaaggttactgaatcagactgttaatatttccctgatcttccatgttgtctagcatttttgacaaaaaaacaaaaaacaaaaaacgagcactactactatattgccactatgtgatttttttttaacctatgaaaataacaattccatgtttcaacataatgaattgcatatttcaactagagttgcccataggagaaataacttgctcacaaatcaacatctagaatttagggtgtttgtctttaatttgttctattggatgtgatatctgaaacacctacctggggctgtctctctcctgatggaaagtcacatcagccttgtgttaatttcttgtagctggtgttacaaattaccatgaactgggtggtttaaaacaacaaaaatgtattttcttgcagttctggaggccagaaccaacagggccatgctccttccaaaggctctaggctcaaatccttccttgcctcttccaacttctgatggctgctgacatagcttggctatggccacatygctccaatctctgctgctgtcttcacatcacttttttttctctctctctctctcctgtgtgcgtgtttaattttcctctgcctccctgttataaggacacttrtgattgcatctagggctctagggcccacctggataattgaaaataatctcaagacccttaatcaaatctgtaaacctaaattaacattcacagacaaggatctctttttgaagtagcgttttttagcctcccacaggctcttcattgcacagtttcaagggttgagttggtgtcagcctgtctctgtaggcccttaggatctcactaagaagtttgtgtatgccacttaacctatattttaagtcaccctatcccaaagacatttcaaggtcagtgaaaatttttccaactattgtcaaatgctgtaacaaaagtagaagtataaataggaaagagggacaagaaaaagaagatagaaccaatcaagccactagtcaaattgcctttatgtttttcaaactctgggcatgtgtctttttcatgactaaaatgagatgtggaaaagctgtggccttctaacaaatctaggaataagtcttgctaccccccagtttaatttgaagaaagaagctggaattccaacccagaacccagaaattttgacctaaatctcctcagtccaaaataaaaaggaaccaggaatatgcagaacacttgttcgtaaaagagcttagtacccatgcttcccactataagaaaggaagcatttctagtgtagccttacagacacacaggcatggtggaaaggattttgggctttggagtaagcaagtttggtttcagtacccaactcctcttgaaactgaatgatttcagttgtcataaaaggtacctctcggccgggcgcgatggctcacgcctgttatcccagcactttgggaggccgaggcgggtggatcacgaggtcaggagatcgagaccatcctggctaacacggtgaaaccctgtctctactaaaaatacaaaaattagccgggcgtggtggtgggcacctgtaatcccagctactcgggaggctgaggcaggagaayggcgtgaacccgggaggcggagcttgcagtgagccgagatcgcgccactgcactctagcctgggcggacagagcgagactccgtctcaaaaaaaaaaaggtacttctcaagcaacacatttgatatcaacagttttttctgagacagtactgacatagaaatcccctctagttcttagaactaaatccaagaatctttgtgtttctccttcatgacttgaagtggcttcttttctaataaatttagttccgtgtcctgaaaccagggtgggtacagcttctctaaaatggacgaaaaaatcaagtcacatgacagggcctgaagagggaaatgatttttgcaacataaccaaatttaaatcctgctttggctgttgaaaaccagaaggagaagaggtaaagaaaaagcaaacgcaagtggagacagtttgagtgctgggttcttcaggttttcaatttctttctgccctgttggctttgacttcattctctttcttattaggtctattcaatggaagcagaaatctatgggacacgctgatattagccaggaagcaccatttgttgaaaaatgaggatgagataaaagggttaggtgcctttagttactaaattccacggttggcaaaagctattcatccgtcggtgacaaccacagctgtcgtggcctccctacggccatgttttgttggactcagccttgagatcctggtttgtgacgtcccactctccatcgtatacacctaagcactcttcgatagaaccctgtgagctccagaacacacaagaaaaggcaccgaacagaactgtcccagagcaggcattagtttttcttctgctacctatccagacactcagactaggaactcggtgccgtttgctgggctgtcgacaccatggacagctcttcaggcgccacctggttggctcggcgagccgaccgtcccgagcccttcctcctctcccgtcaggcccgtgggggcggcggggttggtcctgacgcccagcttggggagcagcaatacgcagccccccaagcttttctccggagtccctccccggcgctcacgctctgaagagcccacgcaaaaggaccaaggaggccagatcttccctctccctgcacccccggcggtgggatcgcagctctgcctgggggcggccgcaggaggcaaaggtagctggagactgaggctggggccgcccgcgggtgccaggcccagccggtcggcgcagagtgggcgtggtctccctcctgatgccccgccccttccctcgcgcggggcggatcttccgcccccggccgcggcgcaatgcggaagagatgggcctgctggagcggaagtgacgctcccggcggctgtggcggcggctgcgggagaaggaggaggaggagccggaggaagaggtgagcaagccggcggggggcggggagctgctgcggccagacccacgggcagccgggcgggcggacgcctccaagaccagtctctgcctccgcagcgtcagcgggagcggtgaggggcgaccgcgagcagccggggtgcgggaggacgggcggggttgtgagcagaccactggttgtgcggggtgccgcgtcaggctgggggctgtggtgacagcggctgtcagcccgcccgcgggaacgaaccgaatccgcctgggcgccggggtatctcttctggcgcataaatggagggtttgggctgctcggctcttccgtctctccgagaaggagccgctttcccgggcagtcgactgcccgggacccccgaggagccccagtcgggtcggtgccccgagtcgtgactcttcccgggtggccattcgtatttatcggccccgcctgccgtccccccagccggcggtagcccggggcaggagaggcggcggtaacctgtgccttttcccttgcccttcatcgccacccccgggagagcctgtcgcgtgggataatccttttccttctcctgccccctaaggagctttgaaccagccttgtcacccttccctcccacctccgctcctttcacctcgaaggaactgcttgaagtttccaaataggttccctttcaacgtagtgacagatcttgaagcaggaagctgataaacagctccggacgaaatacgctcaaaatttttcctttcagtaagcataaattaaacgggaaactcaaccagaccgttgattgacttacagtgctaaaaccttgtcttgccttggtatgagaattgatagcttttcctcttgctttttggtaaaattaagtgacgacttatcttttggaaaaagccattttctcccagagctgtctgttttttcccaccccaaccccccatcaaaacctggcggggagggacttttggatgctttgcagtccttgctgcagaaggaaacatcagcttcatttgctttgctttgcttggttttcgcagggctgcctccgaagaaaggagaatggcgttcagtaaaggattccggatctatcacaaattggatcccccacctttcagcctcatagtggaaactaggcataaggaagaatgtctcatgttcgagtctggggctgtcgctgtgctctgtaagtcatctgttagagcccaatttgtcatggtctctgttttgatttgaaacaattcagatgcaaccattttttagaaaagagcccgacaaccctttcactgtatttcctctagcagattatgcttgtatttccttttaatcaaacttattttcctgcaaactttttgttaacaggtttttgttgagggggtgcagggagatgcaggttttggttgcaggattttgctttcttgggttctgctgctgcttctaaaagtaaatgttttttccaaagaaatattgtttcagtttgtatcatgtatcacataaacccatacagtgtcttgcttgacatatttactggtaggtcagttatagtagtaggtattatctaatattatccaatattgttggagtatttctgttatggccgttgtgttttcattaagggaattgtaaacaacctctagattttcatgtgagatacatgattgattttgtattatttttaaaagtattttgatagtctaatttaaagaaaaggactattgtaccacaagaaaaatagattagtaatgtttgagttattttaggggcagatggatgaaattaaaattaatttggatactgggtctttcttaatgtaagatatgccaggtgtgggggctcacgcctgtagtcccagcactttgggaggccaaggggggctgatcgcttgaggcggggagtttgagaccagtctgggcagcgtggtgaaaccctttctgtacaaaaaatacaaaaagtagttcggctccgtcgtgtgccctttagtccccgctacttgggaggctgaggtgggcggattgattgagtctggaaggtcgagactgcagtgagccttgatctcgccactgcgctccagcttgggcaacacagtgagaccctgtttcaaaaattaaaaagaaaaaaaagtatatgattatatatacacatatatatgatttaggcaaataatcctagtgttgggattagtttagttactgattatatctttataaattaaaaatagtgtttgaaaggcatacttacaaatataagcccttaaatatcttaaactactaagctttctccagcctcaataaatgaagagcataagacctcactctttgcatgtagaatattaatgtcagttaaagtgttaacttgactaaatagtataattgcatcttgatggggaaaaagatagtgacataatgaaaagtcttaagcaaagaacagtatataagaaatatatatttggtacatatattttttgaatgaaggagaaggggctctaggtcttccaagaaataagtataaataatattggctatactcaatcagtatggacttaattgcttcaagttgttttttgtatttaaactataccttggtacagtattaatttccattgcatatattttttactacaagtggaattcttatactgatgaattctgaattaaaatattgtgggggttgggtggggcgaatgtttgtttttgtatgggaagcatttttcagctgcttgtgttttttggtgacgttacctgacttactaatcttgtataaattctaaatgtttctttaattatgattactcataatagcaagtcaaatgttcagctacaaactgtgtattacttatagtttttagaattattgctacactttactccaaggttaggaaacctaagaataataatatttccaaaacctccagcagccgtcttttatgccaaataatggtttgtttttaccaaaaggccctaaaacatttattttggcattaatgtgcattctaaggagaaagaatattaaaatattgtctaagctattctattttcattagatttagactatgtgagcaattcagaaaaaaaatgttggaatattgactctttctgtaaagctaacataaatggatgtctaatctcttggaatgtcattatctttcctactataagctttacagtaatacttaacatattaatatttaagcagctaacaaaccttcttaagtcatttgacttttaaaattaatttggccttcattttggagtgataccaaggtttgtattgtgctgtacagtgttcacttaaaatcttcacactttaaaaatgcctattgtattcagaagctgtgcttggaaaatatcaatgtgttctcttcatcttcaataatcccagctccctgaatttcagtgcattctgcatattcatctacctgaagaatcttctaaaatcatgttttttctttgtttgtttgcttgtttgttttttgagacagggtctcactctgttgcccaggctggagtgcagtggcatgatctcggctcactgcaacctccacctcctgggttcaagtggttctcctgcctcggcctcccaagtagctggaattataggtgtgtgccaccacgccttgctaatttttgtatttttagtagagacagggtttcatcatgttggccaggctggtcttgaactcctgacctcaggtgattcgcctgcctcagcctcccaaagtgctgggattacaggcgtgagccaccgcgcccagccctaaaatcattttttatattaaagcaaagtgtaaccctgtttttcaccaagattaagtttgtactcctcaacctgtcatttgtccagtgttgatctcctttaaggagatctggtgtttcctcagtgccttcccaagcaccatgcttttttcagcttcatcatactgttgctttttacaccttcttcctccaagacagctagagtgctgcttctctaatctgagcctgtcagtcccaccgaggtcctactcaggtcttcttccttcataagactctgccccaaccactccagctcacctttatctctaccttctcttcatttctctagaacttactctgtatcacaaggtgcatacttcttttttgcttttattttttgagacatggtcttgttctgtcacccaggctggagtgcagtggcatgatcacagctcactgtaattgaactccctggaactcccgggctcaattgatcctcctgcctcagcctcctgagtagctgggactacaggcgcacacgactatgcccagataatttttttcgtatttttttgtagatagggggcttcctcatgttgccctgctgatctcagactcctgggttcatggtttccacctgcctcaggctcccaaagtattgggattacaggcgtgagccactgctcgcagccaagacgcatacttcttatgtgctggttttgttgttgtctaaatgctcatatgtaggtgtttttcttggaaaggggtggtggaagtgaccttagcaggacttggtctttatgtacacaaagttcctaatttcaagtctctacttgccctggctttactttaaaaagtaaattttaaacagacattttagtcagcatacagtgttgaggattagcaatcacttaattttcttggcctttgctgaagtgccatgagatacccaacatgaaattttgtctttcatactattagcacataccaaaagattgcaagtaaaaatacaatgaaaatagtctcatacaatggatccccttagggacccacgtgttcactaatgcagcctcaagactctgtctttatgtcgataggattctaagcttaaatcagtcatgatgttatgacattatcagtgttacagtcacctgggcagcttttacaaatactactgtctgggctctagccccctggatattctgatataattagattgtgatgctcatttctgagcaaagtgtatttaggcctttctatgatagattaggggattgcttttttttggcttgcagattttatccaaaataaccatgtttccagaattttggtgctgttgtcttttatggggctactaagtagttttcttgaaactgtcaggctgaaccaagtgctaatactcttgtagcactttgagtatagtgccttcatatcatatggaattctgctcaggttctgtgtctggatgccgcactccttgaggaaaaggcctgtgtgtcttagtaatatttgcagtcttagtgcttagtgtagtgttttactcatacttgaagaaaatgtgattattaaatgaatgacagcaagggaaagactaacctagattacaaagttgataaacatgcagttattatgtttgaaaataagagatatttttccgtaaatttttgttgttgttttttgagcagagtcttgttctgtcactgaggctggagtgcagtggtatgatctccgtgcactgcaacctccgcctcctgggttcaagtgattctcgtgcctcagcttcctgagtagctgggactacaggcgcacaccaacatgcccagctaatttttgtatttttagtagagatggggcttcaccatgttggccaggctgatctgaactcgtgaactcaagtgatccacctgccttggcctcccaaagtgctgggattataggcgtgagccaccaagcccagccctataaaacttatttcatatacatacatgcatacattatatatatatatatatatatatatatttttttttttttttttctttgagatggagtttcattcttgttgcccaggctagagtgcaatggcacgatctcggctcactgcaacctccccttcccaagttcaagtgattttcccgcatcagcctcccaagtagctgggattacaggcatgcgccatcatacctagctaattttgtatttttagtagagacagggtttctccatgttggtcaggctggtcttgaactcccgacctcaggtgatccgcccgccttggcctcccaaagtgctgggattacaggcataagtcactgc

SEQ ID NO: 97114 - DNA, 21955 bp, Homo sapiens
agttaccgaatctctctgttacacagagtggagcctttcaggctggcatggagagcttaaggggcaactgaaggagacacactggccaagcgcggagttctgcttacttcagtcctgctgagatactctctcagtccgctcgcaccgaaggaagctgccttgggatcagagcagacataaagctagaaaaatttcaaggtgagtaaaaacctgtaaagatctgatcaaatctgactggtagaaatgcctttttcttgatataaaccgcttaattaagccttttggcttgcctttgaaagatgctttattgaatacttcccggcacagatgatctgttactgttggttgatttctaatcttactgcagccttagctcacccatgagtccctcctgcttgttctggggtggtgcctgctgccctccagtggcatgtgtggcacctgctgccctccagtggcatgtgtggcacttgctgccctctttggggtcagttcaccatttattgagtcagtgcttcatgccgggcactagacttggtgaaagccttttaccatcaattattattttcttaggagtaattaaaagaaaattttcctgtaatcccagcacattgggaggctgaggcaggcagattacttgaggccaggagtttgagaccagcctggccaacgtgacgaaaccccatctctaccaaaaatacaaaaattagccaggtgtgatggtgcacgcttgtagtcccagcctcgggagactgaggcaggagaatcgcttgaacccgggaggcagaggctgcagtgagctgagatcatgccgttgcattccagcctgggtgacagagcaagactctttctcaaaaaaaaaaagaagaacatttctttagtacttatttttggcgactatctcatgattcagcgtctgcttttgagagaagttgtgacaaatactaaaatcccagtaaaattagtatggtgtcagattaatttacttatgagcagctgagtgactaactcaggaagtccagttgtacatttccagggaagctttttcatgggttcagatgagatgaggggaaagagaaggtgtcagagggctgctgctggctggaggaacgcaggtgtgctcctgtgtccatttgctctgtggatactgacgagcgcccactgggcctcagatgccctctgggcatggcagggaccaggcgctcgcttggcagctctcatgtgagccgctcactggacacagccgtgctcccgcctgggagttcgggatggcatgcagagctgtggggagggagcggtcaccagggcgtgagtgtggacagatgggagtggctggtgcagagccataggtagggggcggtcaccagggcgtgagcgtggatggatgagagtggctgggagcctaggggggacgccgtctttggggagtagagacacacccatgtctgactactgggttttgagtttgtgccagcaaaggtcctgcttgccatttctgtctgtaaatgtcaggaatttcaggtaactggttccctagcgagacctttaaaggaggctttatcttcaaccgatgctttttttgggggggtacacaggcagtccaagtatgggaaggtcaaaatcaggtcacctttatcatggcttgtgctgtgggatgggattttattttcagccacagcgcttcttctagcttaattagtgataggaaatcagcttctctgtaaccagaggttattgaaagaatgaggatcccagagttggaatgagtctgaaagagacgttgtggtttaatattgctaagttaagtgtcgatttgtgactacctatttttaacatgccacagaagtaaaacattgcattaattatgccatatatgtgaaatagcaagtatttttatataatataactgtgcattggagaaatgaattatttataatcctttgcaccaataaattgttcttaaaagcatagaaaaaataatcaggccagaaggagatatctaaagcatgtgctgagaaagcaaaactgaagagctggaaattataaaatattacgacatgatgagtcatatctcctcctcctgattctgtgttactaaatgctagctgcgaatagaaatcgtgtatttcctttctttcataaaataagagctaatttcggcagcaaacagtttggcgtgttattcttttcccttttcagggtggtttaaataaaaataaataaacatgaaagattttggctggaacatctttggaagcacggccgtcctcagcctcactgcactgtctggtttccctctgagcctccctcccgggtcctgccttagtgctgtctgtgccgtgtagccacaggtcgcactgcagggctgtggggagttatttttagtttcaggcagactcactgtttttgcctttctttttgcttgaaaagactgaagttatttcttgtgtttttatacatgagattatcttctgaggctggaacatcttggggggatacaatagatagaattcctatagtaattcccctgcgcaagaggaattgctgaggagggcttcgggaaaccttgactcttgttgaagcctggaaagctttctcagtctttctcattgccaccccacaccacatcttctttttgtaacaaatatttattaactcatctttttattttaaaatgaagttcacagaagatattaccttatataattatagccatataatgttaaaaagcagtgtcatgctgaaatgtaatataaagagaaactgaagatacataataaaatagttttctatgccactgtatggacatttaggcactgctgctttcactcggatcactgagtggtgtgggcctgtcagtgcaggcagatgtggggtaggtactgagctggtgacctgaaaaccataagcaatagagctgagtggcattactttctgaaatggtcaaacctgaaggaagcagtgttcagtcttccctgtctctaggtagtctctgtatttctggaacattgagtgtatgttaaaagtatagaaaaatgcattgtgtcaatccaaaactcagctgggctgggcttagagaattatgagcagcctttccacctgcatggaagtccttttgtgcaggacagttctttgtttccggggtggccctgctccctccaggaggtttaggagtgcccatgtcaccatgatgcctacgccacttctcatgttgctacctgttgctaccaccgggcatcgctgccgcctcctgctctgtgcacagtgtggtgtggccgcctgaccgactggtcaggaactaaagttctctcgaagccttgactgaaaggagaagtgaggaggggcatggagcccagtgccaagaggcagctgcgtctttaggggctggcacttttcagaggggctcttggggccagaaggaaagagccgtcattcaaggcttacacagcgtggaggtgccctccctggggtgtcctgtgtgctgacctctgtcctggtgcctggcggtgtcctggcgcagagctccgcaagcctctgcggggctcttctctgtgtggaggttctcgagatgggcagtccgggtggatggtcaggccaatgagggccttcgaatgaagcacattattgtaaggatgctaattctggatcctcagatattgtgacaaaaacttgacatttttcttccttcaaagtaatttattgactaaaataaccaactgagcaaaggtgatgttttagtatctaaatattccaaaagattactgaaattttaaagtaaaaatttggccaagaacgagaagtctctgaatgtgcttttctggcatgacccctgtcaccaggaagctgtcagtgtggtgttgggcctgattgattcgcatcagctcaggtggcgtcctattggaaggtcggcagtgggagagcagctggccaggtcagaggattcatttctgtctgaagctttgtgaggaactaagatggcttttccagtagcctctgtcattccagagagttttaagattgcttttatttgttcttctaccctggaactaggaagccagacccaagaaatgtatccacaccaggttttgcccatagtttttaaaaatgttgaatttctttaacttgaggccctcacaattttctgggcccccataagttatagaacagggaccaggcctgctaccttgtgggggctgggtgggcactggctccccagggcacagatccttcctgtgggtgggcttaggggatgtgagggattcactttcagatgtgacactccagatgtggggttggtggcacattttttttgtccggttacatccaagtaaaaaggaggacaaattcttactgaacctatgcagtaaactccattgtcaggaagagtaaagtgtcttagcatgagtgttcctgaattctgaaagttcaggagagtaagatgttacctagagagtgttttatttcagctttgaaagcagagtctactggatttagggctagagatagacgaagaagaaagagaaggggcttctttgagcgcacattagaaaatacaccataaaagaaaataccgacaatcttccaaagccacagtcagcgtttccctgccagctcctccagtcttccttccttcctgtctgctgggtggcggctcatctgtcaagttttcacagtcatgtgcttctgggcgcaaagccctggtgagcccggctcgtttccctggtggaatcggacagttgtcgaaggggtgtcagcctctgttcagaagcctgagcccctgattctgttccttgaagtgtcaggagttaaggtgcctgtattgagcaggggctgccgttgcttctgactgagggtcctcttcaggcccactggctcttggcagagctcagttccttgtgaccataggcctgtggcgcttggctcctggagactgcccatagcccctgccctgtggccctcttcccagcatggcagtttgcctctcaaggcgtataggcagggtctcccctcttcctttcctctctgacttctctcatccttcaggggtttacctgatcaggccaggcccacccaggaaaatctcccttttgatgaactcagtcagctgatgagatgccttaattgcatctgtaaaatcccttcacctttgccttatgtaacactatatcccatcatgttcacagttcctcccgcctgcaaggcaggggagtgtacaaggtgtgtaccccaggggcaggatgctaacactgcactgactgagaaaagaatttgtcttacctgtacctgacaggtgtgtacctgaaagaggtgtgtgcccgacggtgtgtgcgaccgatgggtgtatgctcgacagtggtgtgtgcgcccaccgggtgtgtgcccgacggtgtgtgcgcccgatgggtgtgtgtgcccgacagtggtgtgtgcgcccgatgggtgtgtgtgcccgacagtggtgtgtgcgcccgccgggtgtgcgcccgacgggggtgtgtgcccgacagtggtgtgtgcgcccgacgggggtgtgtgcccgacagtggtgtgtgcgcccgacgggggtgtgtgcccgacagtggtgtgtgcgcccgacgggggtgtgtgcccgactggtgtgtgcgcccgacgggtgtgtgtgcccgacagtggtgtgtgcgcccgatgggtgtgtgtgcccgacagtggtgtgtgcgcccgacgggtgtgtgcgcctgacaggagtgtgtctgacatgggtgtgtgagcgcccggcaggggtacgtacactcggggtgtgtgtgcctgacgtgtgtgtgtgtctgacatgggtgtgtgcacctggcagaggtgtgtgcgcccagcagaggcatatgcctgacagaggcgtggcttagtgttcagggtccatagtacatgaagaatcctacagatccctatggacaaggcagtacagtagaatttggggcaaaagacttgcacagatttttttttttttttttttacacaagatgaaattgaaatggccaatgagcacaccctcattcatccagcgagcattgaggaccccctagaggccaggcccatgagtgatgaagatcccgaggatgaagacgccttgccagccaggtcagtgggtgatggcatttgtggtcaggggcacccagcaccacacccctggctgccgttgacagctgggtgagtcccctgctgcctgggcagagccacctctgcagatgcccaggtgggtctcctggggcagggactggcaggctgtagcctgtgagcagattctgggacctgaaagctaaggatggtttttacatttttaaggagttataaaacaaacagaaaaggaagaatctgcaacagagaccataagtggtctgcaaagccaaaggtttatagaaatgggcagacctgctctaaggggcctgcttgctgatggggccttgtctggattgccagttctactaattctggaattggaagttctcatggaggactgtgtgctgggtaggatttccagatcccaagatgctttggctgcattcaaacccacagggcagagagagccctccgccctgttccttggcagaggcctccacactccgtgtgctgaccggcctgccagaatgacaacaactgtcagctgtctgcatcctcctggcaccccttagtgtggctgcatactgaggggagttaaaaccataaacaggtggagaatatctccttccagggaatctcagaggactcagtgatttaagaggaaaagaccaaactgctgctttcagcaggaccactgtgtgctgcctgcctgtcagtgcatacagatacggggtcctgagttggtgacctcaaaaccgtgagcggtagatagacagagtagcccctaatgaagcagaaagactagaagagacaggacctaatttaggtcgaaaagcaaagtgaggcctcagaagatgaaggcagagtgcgagaaaggctttctggaactgacaagtctgccatccacatttcgaaatgtattagaaaaattggaaaaaaaacataygaagtgtagaatgtcagcagaaaggtgtggccacagtcaasagggccctctgtgggtcctgtggtcctggactgcaggtgggcccagtggagactgtgctgcccctcaccctccccggtgggtcctctgtgatgggggtgggtgaagctgagtgctgtcctgaaaatctgaccatgcacagcccctttccaaagacccttctaattttagaggccgccagcagccacgggactaggcagcatcagagcagggacacaatgtgagtcatatgcgcctgtgttcatcctgtggtgtccctgggcccatgggggtgggagggatcagagggatcggagggaggggagtaaaaccaggggaaggagtggaggaccacgaactccctccccttcttggtggccagctgctgtgaggactcgctctcttaggacaggtccactgtctctgagctctggttctggcctcctgtcaggtgccctcgtgcgggaatgagtgagggacagcagggcaggctttccaggcttccagcaagctctacatgatgggyggggagaccctgctcttaaaaacatgtggacccttagcattcttcttcctcagacctggggcctcagcctaagctgagatgacagggaagaactacagatacaccagatttagggaaaataacgtcaagtggtgcagacaagtggaactgctgcttgtgaagtgggctgtggagtcgtgatgtttgctacgcccggcaccatgtttcagaacctgtagcagcgctcaagagagaatcattcctttaacaacaaacatgtactgagcccctgtggggaggcactgaccgaggcctggggacaaatgtggggacagaccagtcctgtggggacagctggcgggggtagaaaacagtagagctgccccaccagccagcggctgctgggagagcaggggtgtycccgcacccagaggaggcaccctgccgctctcccccaggttgcttggtgtgtgcgctgcagggagaatcccgcccccagctggtgtccacaggggccagggacactggtaggtaggtgtggaacaagggagtttgtgacttgggattgttttctacttaaaaaataatctgagtaaagcttggtttaarcagcatcaagttaaaaaaattcctaagaagtggttggattcccagtttatatgtggctttaaggttctgaagaagtacacaattaaccacagaagtatgacttgaatagataagaatttaacaaaatacacactgttgggtgtaaaatcataaatatctgaagttcttagaaattggtaattttcttttagctttgctgtgctctgagcatgactaaactaaaagtaatgaatccagaccttgaagactggtgtgtgtgtaaaaggcaagaagtgagaagattcacgtgtagatccaggacaatctgaatttacttctgttcagtagttcccaaaggctttttctacatggaggsactcggagtgacacagcagctccctcttgtgggcagattccccygtgtaaggtgctggaggctgaggttccagcctgcagccgcttgtgatcctgatatgtsgagagttctggaagactgatgactgctgacccccttcttaacctacgccatcgccatgctggtggtggggatggggctcttggccattcctgccccttggctgcccttccttggtctgagggtacgtgggtggcccttcgggtgtgccaggagctttgtgctttagtgaccaacagtcccctgatgtgtgaaggcccatcaatccgatttaaaataaaacatttgaagtctcttcagaggacggtgtgaggatgtctgcgttcagtgatggagcttggcctctgccttgcccctgattgaggctctgagggttcagatacagtctctgcccactgcatgtgaacagcctggtgggtgtggaggggaggaagcctgtgatgatggtggcactgtgaggaaagtggggatggaaggaggtgtgcccaggaggcagggcaggagagttcatggatgtagggttgcagcaagtctggaaagctgggtttgttttccagggagatggcatgggaggtgggcaccccaggcaggaggggctctggatatgactccagaagcctggtgggctggaggggagggagaggctgggcctgctgggggcaggaaaagggcagacctgtgcttaatttcaatttctatgggagtgatgccctcaaacttagaagggcttttgatgagaagcgatagagtatagctcttgccctcctcagtggcatcactgattttttaaaatgcattttagatatttgtatttctatattaattagtattaggattggctataagtgacagagatgcaacataataggagcttaaccaagagaaagggctgcatcctgcacttgctattgtttgatttatgaactttagacattaactgtgcactgttagttcacatggaggaggatttagctccgtgacgtttctccaaccttcttttcctgtatcatttaggattgattctgggtgaaggtcacagcatgactcacagtatcttacacaccttggatgtatatacgcacttcttatgtcgtaagtaatccagagggaggagtttgctagagctagtccagagttcagccatcttagggctctgggtgagtatcgctgcagtacagcagcagcagctttagacaccacttctgtgtttaaggcaggaacaactgagaaggagcaggccgtggagctcttgtctattccttttgtcagagacattgtggaagccctcagcatattttcacctgtctttcaccagaactgtgtctttctccttggcaagaagtgtgttttgtggccagctttagtcacaaaagagacagaaaatgagcctttcatttttgtggcacccttggtagaggggtaggggaaagggcttcaggacgagcactggatcagcttaccaagcctgaaaccacgccccctgctggtcatcctagagactgagtggcccatgtgctcgtggcctgtgggccctgggcggcctctcagtttcctgcatggaaggcagcagaagcacttatcyggccctcagctcctcggtggtgtcagtttgtctgacctctgtcagtttgttgtcttcttttttttttttttttaagacagagtctcgctctgttgcctaggctggagtgcagtggcacaatcttggctcactgcaagctccgcctctcgggttcaagcgattcacctgccacagcctcctgagtagctgagactacaggcgcatgccaccatgcctggctaatttttgtagtttttgtagagacggggttttgctgtgttgcccaggctggtcttgaactcctgggctcaggtgatccacccatctcagcctcccactgtgctgggattacaggcgtgagtcactgctcccagccttgtttgtcttctgtgttaccaaagtagaaaacttcttctgttctgtaaccttggttcaatcaaagttccaaattcataaatggcacttatattattatgacgattgctgaaagtcatgccacagtttaatttgctttawacttggatttggtatacttgattttttggttctgttttctctttttcctgatttccttgatttttttggttccgttttctctttctcctggtttccttgattttttggctccgttttctctttttcccatattcttgcctggcatggagtggtagagcagagtggggaatggagttgagtttggatccagcggtcgagcaagtgtctcaactcccatgctcagcttcctcctctgtcacgtggggcagggaaggtgcctgtcgggcgcagcgagcgtggtgagtggtagtgtggggccgcgtgcgcccgtgggccctgagcatcagcacttctgcctctccgtgttctcttgttgagagggaccactgcctttcttatgctatcgccagccttttccagcttattcattctgtttcttggaacccatttaattcattcttcttgaaatatgtgtattttctattttatttcaaattgagacttacctttcttatagaatttgttttcttctgggatctcttgatttttttaaaattggatttactgaggtaaaatgtacagacaataaaactcytttttttttttttttttttttttttttgacacagagtttcgctcttgtcacccaggctggagtgcaatggcatgatctctactcactgcaacctctgccttccaggctcaagcgattctcctgcctcagcctccctagtagctgggattacaggcgcccgccaccatgcccggctaattttgtatttttagtagagatggggtgttgccatgttggccaggctagtctcaaactcctgacctcgggtgatccacccacctcaacccagccaaaaatcattcttctaaagtgtgcactctaatatattctgacaaatgtatgccagtgccacaccaccaagcagctgaggtagagaatattcttaccccaaaaagtttcctcttaccccgtgcagatgtcctacccatcagggcccagggcgaccttgtctgatgttgatgtcccatcagatggtttgtattcagcagagcacctagaccaggctgtgaggtacaggtccgcccctggcagcccatgccttgtagcttctgggtggctcctggcttggttgctgtggtgtggagcgttgagtgacctctgcagaacagcagatggtgctgtagggccgcttctaagactcagtggaggaggctcagtggcgttctgagcggtggccaccaggacaaacctcttgtctttacaccatctgtgtgtgtgtgcgtgagtgtatgtgtgtgtgcattccagtgtgcgtccagaagccagtttccttcagaaagctttctgttccctggcttcatttttrccatttagaggacctgtgaagcaatgagatggaatacttatagctggtttaattcagtgagtgatctgaattgtaaataaaattttatcaagtaatttataaatttgatataataaattaagtctgcggaaggggctgattgtgttatggaatgagaagttttgtacatcttttgcaattctaaaaattgtggccaggtgtggtgctcaagcctataatcctagaactttgggaggctgagacaggaggattgcttaagcccaggagtttgagaccagtctgggtaacatggtgaacccctgtctgtacaaaaaataaaagtaaaaataaattagccaggcatggtggcacatgcctgtagtcccagctactcgagaggctgaggtgggagaattgcttgatcccaggagacgggtggcaatgagccaagattgtgccaatgcactccagcctgggcgacagagcgagaccctgtctyaaaaaaaaaagttgtgactttgctgtgtagtctttgtgtaacataattttatgattctattgttttaagcttaatattccaaataggtaataattatgttaaaatgcaaaaaattagcctatactctcatgatctaaatatgtagtagtggttttacagaatatatttcaaaggattgccattctgttttatttttagtagccagttatagaaagcattatttttaaataatgcctaagaatctttaaagaaatacctgtcaatgtatgttccagtttagtatcaaatttatattcagagctcataagaatttaaaaagtttcccagagtctgtaaatggggatggagctgtccttcaagggtgatagtccccctaggtttgagttgtcctctgctgctagcatagtaccacctgagctacctgtgggccaccttcaccacccgtgggtccctccagccaccccagggacaccttagcctccctgggtcgccttagccacccctgggccatgttagccaccacaggatcaccttagcatccctgggtcaccttagccaccccagggtcaccttagcatccctgggtcgccttagccacgcctgggccatgttaactaccacaggatcaccttagcatccctgggtcgccttagccaccccagggtctccttagccatcccagggccaccttagccacctgtgggttacctcagccaccagtgagtcaccttagctaccccaggatcaccttagccatttgtgggtcaccttacccaccctttcaccttagtcactcatggtcagcttagctgtttgtgggtcacttagccacccctgggccactgtagccacctctgggtgtccttagccacccccgggccaccttggccactctgggtcaccttgtctacccytgggttacctgagccacccttggtcactgtctgtgggtgcttgcttgctttaagccacattatgctactgcagctaattaaggtcgctcaattcaagtgtctcctttttttgggctcctgccttctttttgtttttcaaatcgaacacccgctatactcatttgagaagtgtagactttgatttttaaccctaagttgcatggtaaagtcacctttaaagccaatggaaaaagcttaattgaattcatttgtttgaagaagtagaggaatgttgcaagtagactgaaagttatacttagtctgttctgtttgaaaccattctcattcagaaaacagaaatgtgtttatgtaaagaaatatgttacttgacttaatattgtaaggaatcttaattgagaaaataagtagttgtgttttttctttaactgggcagcattgtagcggggtggagtgtgggtccccaggttggagagctctggatttggagtggatcctagcacatggccaccatgtgaccttgggcagtgactcagcccagctggctgccaggctgctccccatgaggtggtgggagccgtgtgggatctgcctactgggtgtgcagctgctgcggcctaagcggcgtccttgcttggtccccccatgaactcaggggtgtggcctggctccgtcatgtgttttgcagggggatctgaggggcccagaaggtaagaaattgcctacggcccttggctaatagaagagggagcagggctttgaccagggggaccagctagtgactctgtgctggttactactttaccaacaccatggccatgctgcacagctgtgcagcctccacccacaaaggccaaagctccaatggcatctgcgatgcttgtaaaacaagtagcagccgtgtccagcctgctgctctgaaacctcagtctcctttactgagatttgatgatgtttaaatgagcaaatgcatgtgtagtgattggcaggtgrccatcgctcagccgacttttcctgtgccctctgcttcggcaggtgcccttcctggctccctgcttcttcctctcctaacctcctggcactgtgctcctcactcaggaattgcacccagcatcacctctgcaggtgagtcccacaccttccccctgctctccaaactcagaccccaagtccagcagcatcttctctcaggcatctatagacctccacaacttaagacatccaaattctcattcccttgccttgccataatcttcccatctcagcagctccttccttccaggctctcaggctgaaggtggcctatcctttcttttctatcccacatggcagccaggaggcctgtgggcggtgccttcaggacatgcctcttgtgcccctgtcccctactctggcctgagtgttccttttaaaactaggtcagaactagattaaagcccgtgtccaagatgctgccacagtctcttgccaccatatgactgccatgtcctcactgtggcccaggaggtcccatgtgcagagccgctggacctccgtctcctctcactctctgttaactgtgctgctgtcagactggctgcctggctgttcctgggcggtttcaggtgctgcggctacctagaaccttccatcttcctttcttcactcttcccagaagagaacactcttcccagctgtcttayggccagcttcctcaccacctcgctgcagtcttttccgcaatggcatcgccactactgccctcccacatccagccatcatcctagaataacagccactgttgtcccctgacacttgacggcagttcatcttttatgacccccattgtccccattgtcagttgtctttttttttccttattagaacataagctccaggaaagcagatgttaacgtctttgttcactgatgtatctcaggcatttaggacagtactggtacatagtagatgctcagtaaatagttagatgaatgaatatttgctacttttcttattgacagacatttctgaggtactttaatattacgttaagtaatgttacaatttcccatgygttgattttatgtaaataatgagtaaattactctcatagagattttagaattctaataaactcatatttccccttcttawaagagtagaaaaatgcttttaagagttttcctaaattaatattctgggaacattaaattttagaactttactctgagggcatagataaaaataaaattaattagataccaggaatgtcagatgctaaatggtgtatggctatttgtgacattctcctagaattaaacagttattaacttgcaaagacatggcagctgaagtcagaaattgatgaacttttaaagttgggaaaaaaagagctttaaggtatcttattaaaattgtaaactgtcagtttaatcatcatagaaaccatacctgatacagtaaatcgttgctattctgctttgaatttctggattctcatgaatcagacattctatttttatgtttctcttcaataatcctaaaggtggaagaaagaaatgggaagaaaaaggaagagaaccatagctacgttgtgagggcattgcttcaactctggtaacttcatgtgaaatgactacaaaatgaattaatatgcagtaagagagccagtgccccaccagggcacctttccacttgctggcacacagatttaccacaattaggatactgcttgtcctgtcatgccgggagagtctaaattactctgactttcaagaaaccaaaaatatgcatttttgatgttaggaagatttactgtgcattgggctgtgtcatttgatgaggaaaaaaccaaatgatctctttatgaaaatgaaggtaaaatatatgtaaatgccattttaatctaactttttatatgaatgtagaacaaatatcaaacaggattatacagtgtgatagtcaggaaagtagcatgcttttgtgttttatagactagtctaaaaggagccccagtagacttggtattgttaaaccaaggagatcttgagaactgttctgtctcccttgtgcccatagaattgtagcctgtggaggtgaccaaggaaccagatcccaagaggcctctgccactgaaaggagatttttattacttgcgtttcctagacgggggggcactcgcgccaagcaggcccacggggcacactggtgtcagtcaaggggcagaaaggagccacaggaaagcccaggacagagcctgagtggggtttctgtgggaaaggcagggcagggcacccgtgtaggaatggctagtgtgaacagttccagtgggccctgggctgtaggagagatcactagctgcctgctaccaggccctggggtgatttcgggcaggcgggcagttagataagggaggtgggtagagccgaccacctgcctggaaccctgtgctggctataagccctgggagggccagtctctccctgtgtctgtaaggcccacaaatgccaaagcattaggaataagaaaatggacgtaatagaattgatcctgtgaggactggatgcctaactgccacatacagaatgtgagaaagcacagaacaactgccttcattgacaagatggtgcccagagctcaagacaggcacacagcaggaggatgccggcaggatccctcaacaagcttaccgtggtatctttcacaatgttaactgtcatcccagatgaacttttaatgacagtgtatctctgaagattgtgcttttagcgtattttcacttaaagtcatatctcatttagtagacctgccagattcctgaaaagttacacacaagccagctgacatgacctttgccagtcatgttgaccacgttctcaccgagctgtggactcctcactaggagcctttacctacggccagatggctgttgtcactgcctgtggtggggttacggtttcggactcacctgatccgttctgccgggattacctacggccagatggctgttgtcactgcctgtggtggggttatggtttcggacgcacctgatccgttctgccgggattttaaagtatgggagtttaggcatactttgcaagttgtttcttgaatatacttttctgaattatggcttgctatacaagttttggtcttttaaggtaagagttacaatggagatggggaaattatacttttctcatttcaaggaaagcaacagtcatgagttatgcatcagttgggaaacgggatgataggaagttgcaaggcaacctggtttcagccggaccgggactctcccggggctgcgtcctgctagagctggcaggacacagaataccactagcagcctccctgggagtggcttggcgtcttggccacctctttccacggatgtggtggatgtgggggtaaactagagagactaaagcccactattgggctcagcttcctgtagaaatcaaatcagatgaaaaccctgacccagagggagaaggcagagagttggacttttgaaaacgtgagtgtgtccagcaaccaggcagcaacagtccttgtttttatcgaacttctataagcactttatttctccagaataatttcatcataaagaatccagagctcagacagctctttaccatctgtcttttccttttttcttaccctgtgtttggcttgatctggactgcacttaaccatgacaatgttaagtgctttcttctgggtaaaaattctggcttcttctccagaaattctggctccacttctcaaattgtttctgtccctgttaggagacccctggggcctcggctggagagacagtgcagctagtcccagcagccactgtgcttgggcctggccagcccctcctcaggggtcacggcactgctcacctggtgactaggtcttctcagccagatcagttcatgtgctctggtgtttttgagcttctggctagtcctcagtttctcagacctggttaatcacagtgtggagtcatttttcataactgtgcacctcacttgtttgatgcatggcaagggaataattaaattaataaacctacagatattcccccttacagttttcaaatacagtaagtgaatttctactataaaataggtccaaagaggttttattgtttcttatttgaaataattaaagaacatttatgtttcccttttgtggtttcttggttctaatcctgtgggttgcttttgacgtcctctgttggggatacactgtgcatccgtatttaacaggagatcccgaactcccagcagggagctaagcacagatgtgtgcacagatgcgtgcttaggtaaggattttgtgcaaggtgacttgtaatatgaaactgtaaaacgtgctaccttagactggagagagaagggggtggtctgatgttttccacacgcctcttttaccaaaatgggtcatcttatctgtctcaggccaggcccccgggggtgcacaggaacagcacagctgcagtgaaggaggggctcctgcagccgggctggccccagagctgtgggtcgtgccctgcgtgttgctcagcgcgttctgcagttgccctggccttagtcccccatctcgctgtgatagccatgcaggtcagcaactgtgagccttcctggctcccacgctgcccccggcacctctctctgtttctgctcccagcatcctctcagcttctcttctgagccccacgcagcggttcctgctttaccagcaccacttctcctctgtcaccgagagagagcaagaggctgccgcgcctgtgccaactgcctggtgaggctccgtcgagtgatgtgcagggccttgcggtacagccctctcgaactcaccccaccagaggcctgtcggcatcactgtcagaaacaggcgttctcccctcccagcccccgtcacaagctaagcatctgtgagaacggaggctctgcttccccgaggatcctgccccagacgtgggggcagcctttgcagacagcttctgtcccactcacctcctccttggttttcactcctttatgccctcacggacctgcccaccagttcccaagccctcagggccatggcagcctccgtgagggtgtgagctgggtaaaaggaattaaggtggagtcacagctaccagtggctgattgcccgtgggtgtcaggctggccctaggtgccccattgctagttcactgtcctgggacggccccagtattgtcagcattgaaggaaagaatccggacaggcagcagaggctcccacctgatgacactgaggctcctgccttagcaccagggcctgggctcccctttgctgtaatgtcgtaaagtatgtcaggaaggtttgcccatgacctggtggagagagaagagatgtgacaaggcgactctggcttgtgtatcccgcccacaggggaagcttggaggagtcggtttgtgaaaaatcagggctctgagggcactggagctggtgctgagttctgcagcagtcaagaagtagagcagagctgaaatcctggctgctcatgggcatcacagatgcattcgccagcagctgggctcggctttgctctaacatccgcccctcctctgggagcgttgtttctctactcctggctgcccagcccagctccctggcctggcgagatctctgcatcatttcttctccccagcttctctctccacccatgccgccatgggagagtttaggctgtctcgtccctgactggcctgaggtagggctgtgactgtctccttttccctctctcctgtcttcctcacctatgcccacataatcagtccaccttccttactgctggatgcaaacctgctgagtctctatggctttcaggatggagttcaaagacatcacctcagcgtgaaaggccctttcaggtctggcccggcacaaccctgacacccgcatgttcctgggtgcaacaacatggggccccagggcagcttcccatgatgcatcagcctctgctggctcctgatgtggcctctgttcctgtcttaggcccctattcctctcggcaggctccacacttgccttactctatctcagaagctcatcctgacaccagctctgtcctctgtactgggaacatggagcagaaatccatcacggctgctgatccatgcatgctgatgagttgctggctgcctccttgtgcacagcatctgggggcactcaggtggccctgctgtctctgggcctgtccctgacactggcaggggttggggcaccagagttcaaatgggggccgcatatcttgtctaaatcttccagagttttaagtcaagccagtgcactattgatacaatatgttgtgtcttcttctttgacaactacatcttcaaaatggaaaaaatatgtggggacctatggtttttatatgaattaatgttggcaaaatatcaaagaccactgaatttaactgttaatttaactgttatctaggtgttctgttcagaggccactcatgtttgaatgagtaacaggatcaagacatgatttatcaataagtgcatatatctcccataacattgattattttgtttttatttctgcaaatgactaatcatgttttatattaagcattttcggataatgcttgttctgttggtgctcacggcctaatgcggggctagcgcacagcggcctacatcctgttttttgtgcagtgtttacagtttttaaagagttgttaaaaaataaaatagtgcaacagagacatggccacgaagtctaaagtacttactctttgcccctttacagaaaatgtttgctaccacttgatctaaaggattaaaaaataaaacatgtcattgggccagatgcggtggctcacgcctgtagtcccagcattttgggaggccaaggagggcggttcacctgaggtcgggagttcgagaccagcctgaccaacatggtgaaaccccgtctctactaaaaatacaaaagaaattagccagacgtggtggcgcacgctacttgggaggccaaggcaggagaatcgcttgaatccaggaggtggaggttgcagtgagctgagatcctgccgctgcattccagcctgggcaacagagcaaaactctgtctcagacaaacaaacaaacaaaaatgtcattgaatttgaagtatacaaaatttgaatatctttctatcaaaaatttgaattttaaggaaataacaaagcaaaaattataattttttgtgttttcaaaaaattattttttctaaattattaagttataagatataaagtagttaatgtgaaatgtttaaatcaaaattgtttaaagctgagttttaaatttaatactttgaaaatttagttaaatcatattaataattttataagaaataaaactattgataattctgatgtctgacatctgtctgattgctgacatggatcctgagtcttacagtgttttgagggcctccagctacattggggttccagtgccagagtggctggcagccccaccctaacgagaagtgaaggggctgggcatgctgtttccagtgctttcatgagatgctgctttgcctggcggtcgggcctgatgtctcgttgttcc

SEQ ID NO: 97115 - DNA, 19355 bp, Homo sapiens
tccaacccgtccatgctggatttcttcaccttcatcaccagcatcctgacaggcatggcacttccctcaggaaccaaggcgaggagtacctcctccagtgccaatcatgaaacccaatcccatccccaccacactccaatcccatccccatcctgaccatcatccgcaatcccaaccccatctccttccaaatctctaacccattcccataaaaaacatcaaccaccagcccaaccctatctccagccccaataccagcctccacttcaagtcccatctccatcaccaacaaatctcaaactcattcacatccctttccctcatgcccctactccatcccaattctacattctttccaatcaccaaaccatcctcattaccatccgcaacctcttcaaacatctcaacaaccaactttgcagcatcccaaccatcctcaacatatgtttcaaatgcaacccaattctatcacctgtgaacttcaatgccaaactcaatctagtccattccccactccatcctcttacccatatccaatccattttcatccccaaccatgacctatcctcatccacaacccactcccatcacaacttacccccaaccaccacccatccccaccacaacccttccccaccacaattcactccaaccacaaccaacccaaaccacaaccatcccatccacaacccacccccaaccataacctatccccacaacaatccacttccaaccataacccatccccatcctcatccccaaccacaacccatccccatcccaacccacccccaaccagaccatccctgttccaacccatcctcaaccacaaactaccccatttcaacccatccttacccctaaccataacccacccccaaccacaacccaccccaactatgacccaccttcaaccacaacccatcccaactgcaacctattcctgacaccactctcaacctcgtcctctaacactcaaacttcaacctctacccaatacccaatcctatctcccattctaacctcatcccaaatcctgtcccatcatcagcagcagctctgtgattttgttcaagctacttcatctctccaagccacagttttctcatctgtaggatcaggacaaaatttgctaccacatggaaatgtactgaggattgaattagaaatgtcagtacttggccgagtgcagtggctcacaccagcactttgggaggccaaggtgggtgggtcatgaggtcaggagttcgagaccagcctggccaacatagtgaaaccccatctctactaaaaatacaaaaattagccaggcatggtgacgcacgcttgtagtcccagctacttgggagactgaggcaggagaattgcttgaacctgggaggcggaggttgtggtgagccaagatcacgccactgcactccagcctgggcaacagattgagactctgtctcaaaaaaaaaaaaaaaagcatttatgcagtttatctagtagctcttcctaattgtttaaatataaagtacaaggtatagaatattgcgcaaaaaaagcatgagttttttaaaaactataaaaaacaccttcgttttaaaccatctataacagaacatttttctataagaaaaccatttctgtctattcctccttttaattaaacaaaaaataccttctatattattttcaataacatcagacaaaactacccagtactccactgtccaggggaaaaagtcttttcctattcacaaattatctttaattcatgtcattccaatatatccagaatgaccaagttccttgtctattgcttctgaagccctaaattaaagacccaatagaatgaaaataatcaatcccaatccctaagggcttgctgtgtatcaggaaatgtgccaacctcagtaactcctcatgacggcccaaggagatgggtcctatgattgtgcccactctacagatgaggaaactgaggctcagagatatggcatggctgccctaagtccagaggtggaggcagggaagatccctgctgttggcctcaaaacctgtggttacagacttaccattgcctggttaaagcccaaggcttgccctttcagtgtcctctagcaggacttggtcagaagcccatcttcatgcttaggagcaaaggtacagggtctgggaggttaaagaaagtggggaaataatgagccagagccaggcagccacatgactatgggaaggagtccttacatatctgattctcagcctcctaacacctgtgctcatgcaggaaccagcatcgtactgggtatcctgttctacctgctgcaggcccacaggtacctgcaggaaggcatgacctaccagctggcactcagcttctacctgacctgggccagtgtcttcctcttcctgatgactggtatgggagaggatgaggttggctttgggtatgggttcagggatgcagacaggaatagcatttgggatagcatttgggacggggtggggttgtggacagggctagataggaagtgactgaagtgggaggcgggattggggatgcacatggggctggataatggggatgggactgggttggagtttgcgtatgggttagggacagtgtaggggatgaaggtgagtttcggtttggagatgggtttgggaataggttagggtatggaatggaattggtgatgggtttaagaataggtttggggatggggtttgatgcagagcagggcatgcaattgggcctggggacaggactgtgattgggattgggtgggtgaactctgtgtctcatctcctgtgccctcttcctctccacaaggcttcttgtcctatctgaattacatgtacttctggtctatcctggcgctccagcccatccggacctaagacacgcgaatgatctcaccgctggcctgctccaacagctctctgccaagtgtctgacaaccctgctctctggcccctaaccccacgctgacaaccctgctctctggcccctaaccccatgaagactcatcttttttcagtctcttctgaccagcctcaatccagattaataatctatcttttaaaataatctgtattttctgcccagaatattctttaatttagctctgagccttggaagcattggtggaactgaaacccctctctggggccatctttgggccctctggggtagagggatagggaagggaagggactcataagtaagggactcaaggcacaaggtcaacaaagaggccgagccaatggtccctggcatacagatagtgcttaatcagtgtttgccgaatatctcattctccccaagcccttttagcttcatcctttatttttgcagtccttaataatttacccttccggaagcaaattccccctgcacccacacttcacctcctacgcttaacagtagctcttaccaccaccccgtctttcttttccccagagtcccccagcacaaggctgtgtaatggccctttgaagatggtttggggctaacagagagccatttcctggacagggcagagttgaaagccaagtacaaagtcatatcattgtcctacagggccttggcctggggctgccatctatctccctctcatacagtggctaagctgcctggttttgagtccaggctctgtcactagtagctctgtgaccacaggcaaggtgtagaacccatctgtaaaatgaggataataatagtactttaatctagataggatttagcacaatgcctggtccatagtgtgtgctctttctgtactattgcaataatcctcccccttgtctcctgcaaaaggctcccaaatttattcatttacttacttaattttgagatagggtctctctctgtcacgcaggctggagtacagtggtgcaacagctcattgcagcctcaacctcctgtgctcaagcaatcctcccacctcagcctcctgagtagctggctccacaggcatgtgacaccatgcctggctaactttaaattttttttctagagatggggtctatgttgctcagtctggtctcaaacttctgggctcaagtcagtctcctgcctcagcctcccaaagtgctgggattatagggttaaaccaccactcctcgctgcaaatttcatctttaaacacagatggagctgcaaccatatgctagacactggatgtatagcactgatcaaactagacacgaatccttatctttatggaattgacattcagcaaggcagcaaaatatgtccataaacaagtagttagagccgggcatggtggctcacacctgtaatcccagcactttgtgaggctgaggtgggtagatggcttgagcccaggagttcaagaccagcctaggtaacaaggcgaaaccttgtctctacaaaaaatacagaaattatctgggcgtggtggtgtcctcttgtcgtcttagctacatgaaggctgaggcaggtggattgattgagcctgagaagtcaaggctgcagtgagccatgactatgccactgcattccagcctgggtgacagagcgagatgctgtctcaaaaaataaaataaaataaagcagacaataggttagaggtaaatgttatgacgaaaaatataggagggtaggtgagatgggattcggaacaagagagcctcacagtcatataaagtggaggcaaggaggtcaggagactccattccaggatgacatctgagcagagataggaccaagggaggcagaaagccatgtagatgggggaaaagagttccaggcagagaggacagtacatgcaaagtccctgaagtagaaacgtccttggcaggttccaggagcaccagggaggccaaaggagaggaaagagatgcaggctgagaggggacaggggccagatcactaagggctgtgtgggtcacagcgaggactttgcttttatgctaaagtgaggcagcagccagtgacataaacgtctctcattgccttaagagaggaatgtaggtctcttcttttactccagaccacaaggttcatgaaaggaatctcctcactagaaagaagaaaacaacccaaatgaccagggacccgctaaacaaagcgtgttcaattcacacaaaggagcccgttgccattgttcagtgaatgagataattctgtacgtactcatgtggggaaacaacttatgggacagattagagtggaaaaaagtatctttatccataatatgtgtgtgtgtgtgtgtgtgtgtgtgtgtgtatatatatataaagtccataccaggccaggcgtggtggctcacacctgtaatcccagtgctttgggaggtttgaggcaggcagatcacttgaggtcaggagttcgagaccagcctggccaatatggtgaaaccctgtctctactaaacatgcaaaaaaattagctgggcgtggtgataggcacctgtaatcccagctactcgggaggctgaggcacgagaattgcttgaactcgggaagcggaggatgaagtgagctgagatcacaccactggactccagcctgggcgacagagcaagactccatctgaaaaaagaaaacataaagtccacaccaaattgttgacagtgaaactcctagaaagtgagtttggagtagagaagtttcattttttaattttcaaaataatcatataagtggaaagaatgtataatcctatcagtggaaagacactcctgagatctccaaccctaccaagaatccaggcccccaggccttagaccgtcaaaactgagtgggagccccaaaggcctccctcggccccaggagtcccagctcccaacccccttttctcccaaacacgggaatcacgaccccagcccctcctccctcagacccaggggtccaggcccccatctcccgcttctccagacacagggtccctccttccggcccttgcgtcaccgtgtaggctccgcctctaattctgcgccacgtgggcgctttcccaggacggccccctgtcaatctccacactggccccgcctccagcccagtggctgggacttaatttgggtccggcccttcggcttgggccccgcctcwgcagcctcactcagctcaagcccctgccgcgcaaatagtcccagcggattctctctcgtgtcgggccgccctcggggtcctttctcttcacggcccatctttgatgctgtcttcagaattgccggacgcaggkgacaagacaatcgtttccatcatatccttgcccckttttgtcagccccagagacagcgtctcctcgcttgttcaggaagattctagcggaagcaggcagtattcctttccctaagcatgaaatggggtttcccaaacaggcgtgtgtattggacgcctcgggcggagcgcgggctggcgccgaggaccggccttgcgagcggcgcgcactataaaatggcgcgtgctgcaacccgcgcccgcttcggagagagaaatgytggggtgaggttcttaagtttattactttttccggctgtgtggaaagacgcacgtgtcctgaagggttcgaggctgcgacgggagcggccatgtagtcgcgtggaaagggtcagggcgtttgcaaggacccagagagcgccctccggggcgagcctgggagttttctgcggggatggtggtggctgtttgggccgcctgggagtttgcgactcctatagctggcgcgagcggggatgctggggcggacccccctccgtctgccccgcggcggagctcgccccttgtgctgcccgcacgccrcgggcctccgccatcttgtcgatttggttgggggagaggggtgggcgggctgggaggcgacattgagttctttccgagtgtttccattttcgtgctacctacaggtgcttccttaggaattctctcttgcttttaaaattctggatggctggcatttttgtgcaacctagaacaaagactgggggacgggagagggttttggggggttccatgggggcacagatagggtatcgagttaccaaagaagtgagagtgaagtttctaggtgaattgccgggtttgagagtcgtgtaggaatggatatagaaggaagcaaacgaggcctttgcttacctgcgggagtcgttctgaccgttcatgccacgtgagagggttttgttaacgttagtttttggcttaggtcctttaaggtcttgaacatcggtttcctgacttgagcggggcccatgcccctgccgaggaggctcagcctggaagcagctagcccatttcctatctcccccaccacgaccccagcaaggatctctacttgacttacctccttcaggcaaccacctagaaaatcgttgagtttgttcatgtcrcaagtgaaagtattttttcatgcattcatcgttggcacgtcgtcctttggcaatattaaaatctaccaacaaatgggaaaagttaacatttgcaccatcttgccatattcaaaaaccttgtgcttaagtgttttkaaagtaagtttcatggccgrrcgcggtggctcatgcctgttatcccagcactttgggaggccgaggtgggtgggtcgcttgaccctaggagttcaagaccagcctgagcaacatggcaaaaccccatttctacaaaaaaatagtaaagtgagccaagcgtggtggtgcgggcctgtagtcccagctacttatgaaggaagtgggagaatgcctttagccaagatcgcgccactgcactccagcctgggcaacagagcagactcttacttgaaagaaaggttcatatttcactcaaaatagtgtacttgtgtacctacagtaacatttttctacttaatgttattagcattgtcacccttaatactgcaatttaacaatctgctttgtgcctgttgttcctcagtcatcttcgaaatgtcttttacagctgatatgttcaaacctgactcagtcgagggtctctcctcattattatttacaagttggctttgtttcttcttccttctctcartaagttcttccaggggatttgtgtcttggcagctttctctgtttatgggttatgtgcagatgtaggcagtgctaaagaaacctgcaaacagtgggggatgaacaccggggacatcttcatgtagtgcatttggggtcctacccatcccatgaggacagtcccccgaggacctgtgacactggggaggttggggcatcttggtgtctccatgagcaaaactggtcattcctaccttctggatgagttttgcatttcctactctttttgagacaagtcttgctctgtcgcccaggttggagtgcagtggcacgacttggctcactgcaacctccgcctcctgggttcaagcaattctcctgcctcagcctcccgagtagctgagattacaggcattctccaccacgcctggctaattttgtattttcaatagagacagggtttcaccatattggccaggctggtctcgaactcctgacttcgtgatctgcccacctcggcttcccaaagtgctgaggttrcaggcgtgagccaccgtgcccggccgcgtttcctactctttaagctctgttagcttggcctctgtccctgaaggtaagtggcctcaggacctggttgcagaggggctggggctcccatgatgtccagcactgggctctgatcacccctgaggacacagtgcaccccaggacctttgacacctgggggtctgaggggccccagttttaatggcttgtggacttgcagactgtttyctcccccactctcactgtgtctttctgtgttacaggtgcagcttcaagcttaggaccacccaccatgcctatccaggtaagaacccttgctcctgctccttcactcacctgggtttaaaatatctcactgtctaggttgacttcataccgtacctctagaaactgattgatgtgccaatgattgtactcagtgtttacatacaaaaaccatctcaggctgggcgcagtggcttacacctgtaattccagcactttgggaggctgaggtaggtggattacctgaggtcaggagttcgagaccagcccagccaacatggtgaaaccccgtctctactaaaaatacaaaaaattaggccgggcacagtggctcacgcctgtaatcccagcactttgggaagccgaggcaggtggatcatgaggtcaggggttcaagaccagcctgaccaacatggtgaaaacccccatctctactaaaaatacaaaaaatagctgggcatggtggcgggtgcctgtaatcccagctactcaggaggctgaggcaggagaattgcttgaacccgtgaggcagaggttgcagtgagccgagattgtgccactgcactccagcctgggcaacagagcaagactgtgtctcaaaaaaaaaaaaaatttagccaggcgtggtggcacatgcctgtaatcccagctattcaggaagctaaggcaggagaatcacttgaacccgggaagcagaggttgcagtgagccaagattgtaccattgcacttcagcctggacaacaagagtgaaactcccatctcaaaaaaaaaaacacccatctcacaactatggaaaacttggcaggcaggcctgggtccaaaccccagctctgctgtttacaggcttggagacattcaccaggccatcactcttttgcgcctcactgctgtgtctgtggaacaggcaccgagcaaatggcccggggcactagcgcttcccgccttctgaaggtggggcttgaataagaagaggaatgcgtggactggagggaacaagcatttgcgtttcaggggaaagaactaatcaaacatgtcaaaactcagcagtggaaaagagacagtaactaccaggtgatyctgtcacgttacttcatgggttttgtaggstgaatgcaatgtgtctttaagyacagcttagcctgcagtgaaccgtttatacataaactgatagaattcagggaactcctattttcacaataaaaataacaggctttatcaggagaattgtttcaaagagcaaaatcagacaagcatgagtgtgtgttatcagaaaagagacaggtgttctcagctctgggaagattttcatttgttccttaggtgtcaggagctggaaccgtggctgcagcgaaatagaactgaaagtgtgttctccgggttcttggaggtttcagctatttctggcaaggaagctggcttttgggcagggttggctgggattgcagttcccctgagtatctttctgagggtcctgggcctttttttttttttttttttttttttttgagagggagtcttgctctgtcgcctggactggagtatagtgatgcgatctcggctcactgcaagctccacctcccaggttcacgccattctcctgcctcagcctcccgagtagctgggactacaggcgcctgccaccacgcccggctaattttttttttttttttttttttgtatttttagtagaagtggggtttcactgtgttagccagggtgttcttgatctcctgtcctcgtgatccacccgcctcagcctcccaaagtgctgggattacacgcgtgagccaccatgcccggccgggtcctgtgctcttaatccgagatcctctgtggggtagtgaatggagctgagcgtttgtcatggctggcttagaggggattcttggggacatgagtggtgtcggtgccagttgggtagggatgtgtgagaggtgagacgacagagctgatgcgggatagggagacagaagggacacgtagcatttgtggattctgggccggcgccttccttacgactgtccagatagaaatgttcctcgccttgtccagtctggcagccactggccacgggtggctcttggacacctggaatgtggctagtttgtggctgggggctgggtttttaattttccttgattagtttaaacaaggacccccctcttcctacaaagcatatttctatgcaaaatggggcttttggtgtttctgaggtkgttaaacagcagcacccactgagcgagcacccacagtgttagtgcttttgcggagaataaactgaacttatcctgccagggtcccagtgagaggcagctgccccttccccatgtcacagaaggttctggtgaagtcagagcagcttagaagagctgggccgggggcagcagaggcgattgaggggtatcccgttaggcatgggaggcccaagcagaagggtttggccccgtcctctcactgaaccccacagatgtgcctgtctgcaggcatctctagtcccgttttccagagaaacactgctgctggggggcggggaggggtgaggtcagtgggcctagatcatacaaggagccatacccaggctgagctggatggggaggggaggtagcctggcacccccagggaccaagtgtcattcagtttgttgcctgatctctcagcactcttctgtgatgtcccccttaggacagtaggtggtcctgggacccacatcaggagggggtgagggcaccggggcctccatgatgtccagcactgggctccractgccactgaggacacggtgccccccgggacctttgacaccygggggtctgaggggccctggctctggggagggctggtgggtatcttggctgccctgcaccccactgaccttctcccctcccctgtgccctcctgcctccaggtgctgaagggcctgaccatcactcattaagaacagaggaggctgcctgttactcctggtgttggtgagaaggcagatgtagacaggtgcccagcaagtgctgagccaggcgctgccctaagcactgggctcattaaccttcttagtaaccctgttggggggcggaggtgggatgggggctggggctgggttgcagtgagatgtccagtgtccagggttcttgaaagggctgcacttggggaccccgtgatgtccagcactgggctctgactgcccctgaggacacggtgcaccccgggaacctttgacatccggggttctgaggggccccactccgggaggtgatggtgggggtgtggctgtttcccccattcgtgccttttctgtgtccttcccctgacagcatccctccagacwctctgctgtttcctgcctaggcgtggctgcagccatggctaggaaagygctgccacccacccacctgggccagagctggttctgctcctgctgcagggacactgagctggctatctcggcgcttcgggcaagaacygcaacaggctctcctgggtcctgcaggtgtacagccgggcccctgccttgtgcctcagctctcgagagctgctgctgccgggtgacctgatccaacctgataaggtgccatcttcagctaccactgcaaggccctgagggcaacagcagcacggcactgcccacccggctgctgatggcctggtgccagctgggagtcctcccggcacttcgaggccactgagccacccttccagccccagcccaccatggacaggggtatccagcttcctcctcaacctcgtcctctgcccctgagccagtgacgcccaaggacatgcctgttacccaggtcctgtaccagcactagctggtcaagggcatgacagtgctggaggccgtcttggagatccaggccatcactggcagcaggctgctctccatggtgccagggcccgccaggccaccaggctcatgctgggacccaacccagtgcacaaggacttggctgctgagccacacacccaggagaaggtggataagtgggctrccaagggcttcctgcaggctaggggaggagccacccccgcttccctattgtgaccaggcctatggggaggagctgtccataygccaccgtgagacctgggcctggctctcaaggacagacaccgcctggcctggtgctccagrggtgaagcaggccagaatcctgggggagctgctcctggtttgagctgcattcaggaagtgcgggacatggtaggggaggcaaaaagccttgggcactaccctccctgtggagctgttcggtgtccgtcgagctagccacaccctgacaccatgttcaagggtacyggaagagaagggtgtctgcccccaacctcccctgtgggtgtcactggccagatgtcatgagggaagcaggccttgtgagtggacactgaccatgagtccctggggggagtgatcccccaggcatcgtgtgccatgttgcacttctgcccaggcagcagggtgggtgggtaccatgggtgcccacccctccaccacatggggccccaaagcactgcaggccaagcagggcaaccccacacccttgacataaaagcatcttgaagcttttactccgtttttataaggattggtttgttttgtgtttttgagactgttttgctcttgatgcccaggctggagtgcaatggcgcaatctcagctcactgtaaccgccacctcctgggtccaggtgattctcctgcctcagcctccggagtagctgggattacaggcacctgccaccacgcctggctagttttgtattttcagtagagatgaggtttcaccattgttggccatggtggtctcaaacttatgacctcaggtgatccgcccacctcggcctcccaaagtgctgggattacaggtgtgagccaccatgcctggcctgtcacgggttttctcttaaggtctctgttgctatgccttctctgaaagcgtgcattggctgtgtgctgtgggcagccagtcccttctgatgggtctgcttttgctgtgtgtggcttctgtgttggtctgggtttagggtgtgctggggccggaatctcaggtgacagctctgtgaggactcactgagccctagcagttctgacctcacagctgaggccttgggcacaggggcccctgttaaacagcggacagaacactccaaactctggtgcttcatcctctgtgggttcagctgctgagctgcgtccagggggagccacccaggcctctgcccactagcaggcccccagctctgaacaggtccttccagcaggctgctgggaaagggtgggctcttgccaccaggtgggagttggtcacagccacaggtaaccccacctggcacttggggtctccatgaacctgcaaggaagccaggctccctcccagggccagaaagtgtgaggggtgttcattcctcagccttcccagggtcgtggctcctggcatccatctggggtggcccatgaccacccagctcctctagggaatgccgggtagggcagtgaggcaggtctggggactccccagggatgagtctgcatgagaggctgccctcagcaccctgggaagaaatgggctagggcagtatgcaggtggcccttgtgtggaggaagggttgtcccagcttccactccctggcgtttctggatcctgtgccttttttaggtcctgggtcactgggaatggctttgaacctttctccgactgccccatctaatgggggccaagtggctgttattaagcatccactgtaccagggctccctacgggttccctggttagacagtgccacacagccatgggtgtggggcaaggcctgggaggggcgggcgctctgctctaggccacactatgggagcctccccttggggggccaggggctcaaagggcacccgtgcaggtgctccacagcgcctgctgctgcatgagtgtgggaggagtagctctcatcagcatctgagaaatgattgcagtggtggatgtgtggcccatgtgatggttgggagctgaacactccattttatttaacctaaatttaaatagccatacatggtcatggctactgtattggccagcgcctccacattacttgtagcagttacagtgcacagccgagagtgtcatcggttttccctgctctctacctgtccctaggaagttaatttttggagttgtggagtccactgggttagagtcgtggttctgccaagtgagacacatcagggcctatcacttgcccagaggcgcacagcctcggaaaccaggctttgaatcgtgcacctttctcaggtctgctgccagatccctctgactctacccaagttcatggttgcattgagagctatggaggtcaccaaataaccagacttgagggtccaactcctgtgagcctggtctccacagagcacatggtccacattgaggctcactgagtaaggccttgtcacaagctgcaagtggaggtacgtacagggtccaccatgtcctcagccagcctacctgcttccagtgctcatatggaaaggtgcataaacataccacctgggtgtggtggctcacacctgtaatcccagtgctttgggaggccatggcaggaggattgcttgaggccaggaatttgagaccaacctggccaacataccaagaaaacaaaattaaccaggcattgtgcacgcctgtagaagctgaaacaggagggtcacttgagacaggagttcaaagctgcagtgagctatgctcatgccagtactccagcctgggccacaaagaccttgtctctacaagaaaagtgccatgcaggcatgcctgcttgttcagacatgggtacatttgtgcttgaatgtgtgtcacagacatgttttttaccagcatgtacgtacagaccacctgtgcacgcgtctaagtgcagaaactgttcacacatgtgacacgtatgcatgcacactcatgccaccgtcacacagacacatgcacacacaaactagtttccaggccggagactccacacagccctcgctccccatgcacacaggcgcacagtaagtcacagaagccagagcagctactgagcatacatgttggggtccagtgtcagctgggggtagggaagccctggtttctggctcacacggggccccccaaggcccgcaggcaccctggtctccaggccagcaggcccagccccaagctgagtgccaccagcacagctacagctccggccagcaggggcaccactggagctgcagggagaacacgcggggggtgagtgccaggacttggcaaccctccactcccaccccaacacagaggactgtcacctggggggatggcagcctcataggggccatggcaggagaccccatgggcgggaggccgggccggggcagtcagctggtagaagcggcctagtggacagggggccgggcacccggggaggctgagaggcaggggcaggtgggcggagtcattgcggtagaagagggagacggtgacattcctggagagagaggacatggtggcacctcctccctcctgtcattgatcttaaagcctggagaaaagggcttctgactcccacctgtcatcctcccagcatcatcccatgcagctccccacctggccatgccctctgcctgacacatcaccccttgctttgagagttctgtcccacccatgtccctgggcaccaaaccattctcaccctccatctttggcgggattccccaggtgcttccggaactcaaagccgaggcaggcagcatatggcggggtgtgtccatcatagaggcccagggccccctggagggccagcagggtgctgtcatgctgcaggtggacccgagggctgagacggcacttctctctggaggcctttctcctgagcactacacttgcgcatccagatgtcccccaggcttcttagaaccaaccccccaaagctactccttcctcccatcctgaaggcagtaccaacatttgcaggcggccacttaataaagattgctcaagtaggtgcaaaatatgattggactaagcagcctttctcctccggaaggacagactgcttagtccaatcatagtttcttaaagaaaacaaggaattatatttattcataaattcttcctcccataacaccgtcacctccctctttccagactaatggtagagcctgagagtagggtttggagatacgggttaccccaggcagtgggctgagatccactgggaccacaggctcttcctcacctaaatcgctgtcaccctcatccctgtgcctcagtgccatgtggcactgcttcccaaggactcacagctgagtacatgaccatcttgaggggcagccccaggcgctggacccgggagaagtttgcaaggatagcattcagcaggatccctgaggatgggaaaaaagagcttagactctcccagaggaaggcaccccagcctcccagacccacacctcaccccctgtcagctgggccttctctgctgcccggggtgggcccacgtgggctccaatatccaaagccgagatctgggcaagagtccgcaggacatctggggaggcccaggctggtagtggaagaccgtgggcttgctgtggggagacaggacagatggaccatcctgagccctcgagtttgcctctggccccgcaggcctgtgctgccccctgctcttctgagtccccccatgggccggatctggatctggctgggaaatcatgatgtggataacagtgtttttttgttgttgttttttgttttgaaacggagccttgctccatcacctaggctggagtgcagtagcgcaatcttggctgtctgcaacccttgcctctcgggttcaggtgattctcctgcctcagcctcccaagtagctgtgattacaagtgtgtgccaccattcctggctaattttttttttttatttttagtagagacggggttttaccgtgttggtcagactggtctgaaactcctgacctcaggtgatctgcccacctcagcctctcaaagtggtgggattacaggtgtgagccaccacacccagccaacagcgattattagttaataatagacatcgtcattacacagcccagaaggctttatctgaaacccctggggccagaggtatttcacagctcagacattctggactttagaaaggtctgatggtgctgacaccacacagcatggaacacacacagcaagggccggggcagcccccttagtcacacacatcactgctcccaccctgcgattcagaacattcccgtgagctggagtgagcaaagactagcaagagtactagctgggtatggtggctcacgcctgtaatcccagctcttggggaggcgaaaggattgtttgagcccaggagttcctgggcaacatagaccccatctctgcaaaaaattaatttttttttaattagccaggcatgatggtgtgcccctgcctgcctcagctacttgggaggctgaggcaggagaattcctatagccagggagatggaggctgcagtgagctatgataatgccattgcactccagcctgggtgacagagtgagatcctgtctccaaaaaaaaaaaaaaaaaaaaaagcattgcatcatttcaggtcagctcccgctgcccaggttttgggttttctgattataggactgtggggaggagttgccaaatgtgtagcctcaaaccctggcaaggccctcactgtacaccaggcactattgtaagcacagtgcgtggattaacccatttgaatcctcacagcgtcctggggaggtgttgataccggtgttgccatccccactgtgcagatgggaaaactgaggcacagaggattaactacatgcctgagggaacacagctagtgagtagcaagctgggattggaaacaggtgtccttaaacccttggctgggaaggggcagggctcacctggcacatgagggtgtccagaaccttccatgccctgcgcagtggctctccaaccagcgacagtcccgtgaagttctccaggcgactcaggaagccctggatgcgcggggctgggtgagcccaggcccatcccctgcatcccgccccccaccgccgccctgctcaccgtccagccctccagggcctcctggtactcggcggcctcggtggcctcccgcagcagctcgtggtatcggggacagctgcgcatggggaacctcagcagctggggaaaactgagtctcagagaggacagccgtgtgccttgccttgggtctcacagcgggtcgggggaacccgggctctcggcccctgcgtctttgtcgcagtttctcccagatccaggagagcagcgtgggccggggctcaccctggtctggacagaccagctcgaggacagtcttgcttctcggagccagctcaggcggccagacccagagctgcctctctctccacccgctccctccctcgccacacgtgggtccagccccctgaccttatcctcagccacgggcaccgtgtgcaccgggatcggcctccagcgggcctcggggctccctggagcagcctcgggaaacagcccggcaaggttggcctgggcactctccagc

SEQ ID NO: 97116 - DNA, 123016 bp, Homo sapiens
tttgtttttccatttgacactgcctgaacatctggttgttcctatcatgagtaatgatactatgaacacttgtgcattcttttctgtgcacggatgtaatctcttctgttgagtctagatctggaagtagcaaaatgtagtcacagggcctgcatatattcagattcagtagcagtgccaaactattttcctaagtggttgcaccagttcacattcccacaaatcacagaggtccagttgctccaaattctctccattcatattcccttgaatcatttctgtgaagtggttttatttcttctttaaaattttggaaaaattcaccagtgaagctatctgagcctagagtgtgctttttttctttcttttttttttatttagttttttgtttgtttgtagcaagatttttaattacagatcccatttctctagtaagtatagaaatgctaagatttttaaatttcttctatcagttatatcaagttgcattttcaaaagattttctattaaacctaatattttaaatgtattggtataactttttataatagcctcttgcttgcattctttatgaattttgtattattatttattactgttattctccttactttgtctttcagatcggatattttctgctgatatgcccttcatgctactaatcttgtcttctatcatatccagtaagtttttaagctttttcaatgagttctcaattttagatactgtgttttacagttctagcatgttcattttattcttttttgtagattctggttacctgtttctattctccatattgtcacatgtttttcaacttttcctctatttttaacataataattttggtgattaggtttagatgctaactccaacatctagattgtctctgggtctgggtctgtcttttctcttgatgatagatcacttttcctgcatctttgcatgtcagtaatttttagacattgtagatgctttgaattacactgtgaactcagttttcttcctctagtagacagttaaattacaaacaaatcatcttgattctgtcaaggctttgctagttcagttcttagggtttagttttacccacacttgtagagtattgtgctgactcctaaaatgtggacttcctattgtcctgggtaaaattttttagggtttcctgaggttgctccatcttgcctggatcccaactccaaactctgcctctctagcactgcagagcttctataatctttgctcagctctcaagcaactattctctactaagcctctcagagttgcaccctgtgactaggtagtttgggattaggccaggaactcaaggagattatctattcagattttgacagattttcccccactaataatttggctatgttttctttaagaccatgctactaagtctcagccaccatggcactctgaaactttaatctctatatcttctttactcgacatggccacgattctctgcgtaggctctgtattcttgtgctgcaaattggaaaactctgtcagagaaaaagcatcaggaatgctggatcacttcttatgctctatttctctcaaggattacagctttttcattgctaccccatggctgcaaataattattttatatgctttgttcaactcttagatatgttcattaccatagtttaagtccaatgcaagataagagaagtctcctctacttagatgttagcctcatagcctcctctctctgtttggtttctgaacttttttctcaatacaggtagcccttggtaactgataagctcctcatagagagactgcatacaaactgctggacctacttgggactgctttgctagtcctgctctctaatttttgtccctcccacccatgacacttccataaagcttcaacacagcacttttttttttcttaacttctaagtctcatattgtgtctaggcaaatgctctaagaagacaaaacccatgacaatttagggctcatcgtgtacattctttgcctattgaatcttggccctatgcttctggtcaccttcaaacagctgctttttgctttgttttcagttttaatccaacgtttataattattcttggcggaagctttagtctgatacaagttactcgctcattgcaaaactcctcatttgcattttcactttaactttcacattctggcctaaaagttaaaataagataacacctaatcaagagatgacatgactcttgatttttctcggctttgtcaccttgttatttttgaaccccctcctacataatttataccatttcacctataatatagttcattgacgcaagtaattttaatgcatttcagtcaaataaatctccctagtgaaatattcttagttaataagtaacacgtaaaaagccagaagtattcgccagaaccataaatttgaagctaatttcacaactgttgaagagcaagatgttggatgtagaccctgcactgcatcttcagggccacaagacactgcaaaattaaatggaccttgataagcatcatcagatgtggctgttgtgttctttttccgcattagcagtggacccttgcatgattccttaggctacaagtcaaagggaaagtatttttttagtcaaaaaaagtaatttaaattccaatattatgaatgtgtactgacaaatatcagcaaggggaaaaagaaaaaagatctgaatttacttatctattgtcatggcaaatcttttatttggtttaaagattaagatttacaactgatgccacaaattataaaaaagatatctaagttttgtaagaaaatggaaagaacataggctgagcatggtggctcacgcctataatcctagcactttgggagaccaagatgggcgatcacctgaggtcaggagtttaagatcagcctggccaacatggtgaaaccccgtctctactaaaaatacaaaaatgacccaggtgtggtggcgggtgcctgtaatcctagctactcaggaggctgaggcaggagaattgcttgaaccgggaggcataggttgcagtgaaccaagatcatgccattgcactccagcctgggtgagaagagtaaaactgtctcaaacaaaaaaaaaagaaagaaaatagaaggtaaaatagtttggaatatcatatgaaaatacagttagacatcaaaaaagaaaagattcttgactaaagatagtagaatgagtatttgagagtaaaagtgcaaggaaaatttttaaaacgatgactattcttctagaatctcattcgtaaagggaaaagaaggaggaaaaattcttctatagtaaggtaaaggagattcaaaaatagaatggcaaataataactaagcaagtcaccaataagactcatcccacaagaccctccccagataaatgttcttattccaaagcccagattcttcaggtctatattatttgaacaaaatactaattctttctctctctctcagtctttctgtctcagacacacacagatgcaaaaatacataactctcttttaacaagtttcattcacttatttggttgttttttagataaactttaaattttagaataattataaatttacagaaagttgcaaagatagtacgaggtttctgtgtgcctctcacccagtttcccctgtgttaacatcttacattatcatggtgcatttgtcaaaaccaagaaactaatactggtgcattgctattaactcaatttcagactttatttgatttcacctgttttccacaaatgttctctttccattccgagacaccacattgcatatagtcatcacgttgcctcagactcctcttggctctgatatttctcactctttccttactttgcataagttagacagttttgaggagtactggtcagatattttgtagaattctcctagatttgatttttgcttgtgctttcttatgattaaatgtaagagttttaagttttagggagaaatacaacaaggtgaagaggctacatgatatcggaaagtacataatatcaacgcaactatcatcactggggaggataaccttgatcacttggtttgccagattcctccactgtagagctattttttttttcctttctaaacactattcttcagaagccatattcaaagagaaaaggtaagactgggtgtcacctcccggaggggcaatcaatgtttctgaaacctaggttttaggaacaagcaggaaaatgggaaaaaaatccaaatttcttttctcaaaaacaataacaacattaaaccagtatatagcatgttatttcagcatccaacataataaaaatttaaatatcattatttcagcctcaggaattggaaactggcttgcagttcttgctattcaattgaatgactgggaatatgacacagacctgagatggtaaatgcacaggcaagctattcccatcttctgtctcatggcagacaccactaatcaatcaaggaatctctcctaattttacctgatgtagctttggaattctcttattatcaatacactagaatcactggcacacaagttgaaaactgtttgccattcctggcaaatgtgatcagaagactgaccattgggcccaggaagaagttgtttcccatgatacatttccaggtggggttttacttctgatccatcctcagagtagagactgaaatgtcctcttctgcatacacttattgttatcctcaattgtatacaacttcgtgtcctactgcatccttctgatatatctacattcaccatcatttttctattatacttcttttctttcaggattagatgacaatagtcttgagatgaggtaaatgggagaaagaacgaacaatttaggtaaataataaacaataataattattttgaataaattgagtaaactaaattgtttaatttacttaactgaataaacaatttaggtaaataataaacaatataggatgaggtaggtgagagaaagaatgaacaatttggtgaccttatggtcaacagcttcagacatgttttcatatactttacaaaatttaaaaatgcctcccattactatgaaatttatcttgtcattacacttagcttaaatcattggcaatggcagtagatgcataaatagacacctaacatcacttcttagtttgctttccagtattgaaaaacaccaccacaaatttgcccttcttcttcagcaagcattttagctttgactcaacagtctttattggggaattaaagctgtacagcacattcaaagttgccagcatctttattcacctcctccttcatgcttaattcagcataaatatgatatagttctaagaaatcaataaatgtgatcctgcctatttatctcttcttatgtattcaaagtggtttttgaatatctatcttatccaatcacttgtgttagggaccacagaggttcatagcatagtattagtgcccttgaggaatttataccctacaagaggagacttttccacaagtcaggaatacaatgaaaatctatatgaatgggaagagtattacaggcattaagaagatagggattccttctcactgagataattcagagaagtagtagagaaggcaagtatagttgccaatgtaagccttagtttatccagctggtctaaaaatacttatcaaattttaagtatatgccagaggctggcgattatagtaaaataacaagaatatggagtttattcttgctgaataaacaatattaccagcatggtctttgacaattgttctaagagaaacacgcataagatattaaggaagctcagaggaaaatcatctaaaaaggattaatataaaggcaaaaattccaggaggcttctaagaggagtaactcttgagccaagttttaaagaatgaacagaaggtaattatgtgaacggggccaaagcaccgctcccaaagagagaagggcttggggaagcccataaagcaagagacatcatgatatacctggtaccatgagaggaaaaggagttgtccatgcaagggggactggattgctagccagcagacggaaagaagaaggcctgagcttcacggtacttaacggtatcagttgactatgcagtacgcaatataacagcatgaaaagtggagcttaccctaaaatatcttctaattatttgccatgagctcctctggattaagatattgcccccaaaatgcccttttgaagtgttgcccatccagatcacccatcatcccctctgcatgggtgagtttatcagaagaagaatgagcacatacatcactcttataagtctaaatcttggagcttgactccaactaggcaaagtgccaaatggggatatctcagtttaggagagaggggaagagagcatccaccaaaaaacaaaaataataaataaaagcattaagggcagctgggcttaatggctcatgcctgtaatcccagcactttgggaggccaaggcaggcggatcacttgaggtcaggagttcgagaccagcctggccaacatggtaaaaccccatctctactaaaaatacaaaagaaattagccagccgtggtggcacgcatctgtaatcccagctacttaggaggctgaggcaggagaattgcttgagttcaggaagcagaggttgcagtgagcagagatcgtgccactgcactccaacctgggcaacacagtgatactcagtctcagaaaaataaaaaataaaaaagtaataataataaaagtattaaggacacacttcacctagctcacaggctatggatttttttttttcttttttggtaaatagtagtgagatgcctggatcagaagctaattaaacagctgacggaacttcatgttggtattcaagacttgaaagaagaatatagagacttaacagatgtagaattaaatttcccttagtctagcctagcctagacaatatttattttattttatttttacgtgtgcattttttattttattatacttttagggtacatgtgcacaacgtgcaggtctgttacatatgtatacatgtgccatgttggtgtgctgcatccattaactcgtcatttaacattaggtatatctcctaatgctatcccctccccccaccccaccccaccccacaacaggctccggtgtgtgatgttccccttcctgtgtccatgttatctctagataatgtttattttaatcatccatccttaacagaaccttcccctaattataaaaagcctttcagaaagatatcctatagaagttctataccatgacatgaatagacactggattccctgacttgggcaatatttatcctgtttttcagtctgaaaactgatttttcttcyataccaatgtgccattgtcagtgcrctatcatattgtgtctttacttagagatgtgtctcaatatgagaagactaaacaataatgatatagacctataaaggactatgtgatgtatcattwcatttacatttcttcttagaacatgaaaggtggtgaagcaagaagaataaagatatacaaagtagaaacgtttgatttttcttgggtctacatttttttctctatcataaccagcttttaaacwataaaatatgctcatttatgaggatcatcattatgagttgcagtgaaaatccacttcaagccatctgcctagttacaaaacctcggagtgcctgctctcccttccccaatcctgcactgtggttgctgatgactgagaaggctgtcacatccagctttcctgactggggtgtaactgattaattctccctgaacaccatacaagatgagctgttaattttgtttgtttttcggtctatcttctgacttgatgattgattcccactgcagatcattaatggaaattaagtatttgatccggcttttaatttgaattttaattaagttttcgatccagcttccaaaatgtccaataggtagaactgccctttctaccctattgcctgctcatcagtatgggatttagtgtgacctcctgtctccgcctgattccccaaccaggagactacagaggctcttagtgcactagggtgaggaggtgtttgctcagttctctcccactctcctaccagaccggtcaatgaacacaatgcttatgtccccagtgctcaggccaatgccaataggatgatgaataaatagtaattagatgaacacatatatgtgtgggtgaactgatgactaaactatgaagaaaactaagaagaaactacgtactgggtatttttctgtttacaaagaatcttccctcattcaataaccactaggtgttcctgttagacttctagaattatgtgacgggtgggatatttcctactgatgacccctcaaaagaatcccattccttcccttattagcatgagaaagtggaaagttgctggttttccagagtgtaaagactcatcccagttggtttcagaagcatcttttttattttgtaaaaccttagcacatattccaaacaattttaattttacaggataaaaaataaaactgtgttccttgataactttcttacgacacacatatgcatgcacaccccatgtcttaaatctatttagaatgcagaaaaaacagaacgcatttcttgcttctcagataggcagaaaataaaaaattaggtaatttccagagtaaggtaatttccagagtaagtgaggacatgggaaaattggtactttcatgcattgttggtagaagtgtattatgatgctccatttttaaagaagaatttgttgatattatcaaaattgtaaaattgtatctgtaatttaataattgtaaaatcatacctgtaatttaagaatttcatgtctgagaatttattcttcatacttgtacaacattatgtacaagaacatttattgcagcattactcatcatagcaaagaaaattcctataaaaacctaattttctattattagcaggaaggttatatatattatccttgcagctgttaaaaaaataatgaaaatgatctttagatactgctgcagagagatacatctaatgtcccctttgggttttaaaaaagatatacatacttgtgtgtgtgtgtgtgtgtgtgtgtgtgtgtgtgtgtgtgtatgtgtgtgagcatgcacatgcttgcatatacttagagaaattctagaaagagatacaagaaattaattatagtagctaccccaggaaatgaaagtggaagaagtaaaggcaaatttttttttctaatttgacctttctacatttctgcatgttatttttataatataaaactagttagtaaaaaagtcttgtatctaaaataatacatggtttaattttatattttggggtttgcaacaaccttctcaagcaacacacaaacacagaaaccataaatataaagaccaacaaattgaaccttgtaattttatttttacattttaataccaaaggggagaastcattaaaaggtactttctaacgccagaaaagggttcatagtcttgacaccaaaagcacaattcaaaaagaaaaaaaattataaattggattaaatcaatattaaaaatttcctctgtgaaagatccagggaagagaataaaaagatgagctacagacatggagaaaatatttgcaaattacatatcagacaaaggccttgtatctagaatatatactctaaaaactcaaggagctctcaaaactcggcagttaaaaagcagacatttgtagccattgaaatgcaaagagaaaaaaataaaacgcaaacaacccaattagaaagtgagcaaaatatatgaacagacattttactgaagaggatatacagatggtaaataagcacatgagaagacgtttaacatcacatgcaaattaaaaccccaatgagacatcattacacaactatcagaatagctaaaataaaaaaataataactataccaaaagctggtgaggacatgtagaaactgagtcactcatatattgctggtaggaatggaaatgacactgccatcctgaaaacagtttggctgtttcttaaaaaactaaacatgcaactactatatgacttaacagttgtactcctggatatttatcccagagaaatgaaaacttaagttcacataaaaacctttacataagtattcatagaagctttattaataatagacaaaaactagaaacaatcctaatgtcatttcataggtgaaaagttaaacaaactatgacacatccataccatggaatactacacagcaataaaaaggaatgaatttgtgatgcacacaacaatctgaatgaaaaaacacagtttcaaagggttgcatgttatatgactctatccataataacattattgaaataaaaattataaaaatgtataacagattagcggtggctagaggttaagggtgaggaaagagggtgggtatggctgtaaaggatcagtacaggagcctgtgttgaagaaatagccctgcatcttgattgtgattgtggttacattaatctacacacgataaaaattgcacaggactgcacacacacaaacacaaatgagcgcatgtaaaattggagtaagatctgtgagttgtaccaatgtcaatttcctggttttgatattgtactgtagttaagcaagatgttaccattaaaacaaactaggtgaatgatacatggaatcaaatgaaaaagcatttaaaatagtagaggggaaaaaaggaagaccaaaaatatattaagaaacacataaaaaagaaagcaartaacatagaaaaagtgaaattccaatcatattattaaacagggacatttcgtgttgataaaagttacaaagccaaatgacaaagcatgaaagtctatgaaaaaagtacatgagacatatgccacaaaatacaactgtagtgggaaaatttaacacaccagtaacactttttgagaagtatattgacccttgcactctacaaatggagactaaatattmttttcatgtaccttggattatttcctaaagtgtatcatattagctacaaaataacctcaaaaatttcaaaaagtagaaattccagagctcacagcctctgatcattttgccctaaaagactcaccaggaattacaattaaaaataaaaggtgaaatatgcaaaattatatctcagaaagggactatatctgtagacataaattttttaaatgagagaatgcatcttaatttttattactcaagattaatttgacaatctcaatacatggttttataaaaaagtacacactactaaaatagaagttataaacactaacttaccaataatttcagaacaatgtaacaatgacttcccaaaaaatgcacttggtcaaaatggtttgaaaggtagattctttcaatttatcaaagcaaatataaaaataatgatatacgacagagtatagagattatatttaaaaagtgaaaaagttctcattcattttactaatgtgtggccctgatagtgacaaattcagcacatgcacacacacaaatacacaagcacacaaaggtactctcttacacttttgatggaagtataaattgatgcaggttctccagggagcatgaattaatttttttaaaaaaatatatgtgcccctttacctaggagttccactaaaggaatttcccctgaggtgataatgtttcacgtgtgagagattatttgtgcagcagattctggaacaatgtaatctggttcaatgtcattttgttctggactgatagggaaaaaaattgattctgactggaataaatgggattgattgatcagtggacaggttccagccacccaccatgctgaactggactaattaagtaaataactatcttatttgcttttattaatctttcttgtgtgtgtagctcacatttattgtaatgtaaaatattagaagtattttatctctctttagaagtctggtgatgttttgtgactacaaatatgctgtaggaatatcactgttgtttccatcaatcagcctatggtaaaactggtttccctacatattgttttgcttaaagttgcagtctccaagaatctatggacaataatgttaagtgaaaacttactgtgtatgaatattcatagtggcattgttagcaacaagatatgaaaaaaaaaaactggaaacaacctaaatgtttacagtgaagatttttttcagtcacctcaaattctttgacattaagcatatgaaagaatggccaacatcactaaccattagagaaatacaaatcaaaaccacaatgagataccatctatgacatcagtcagaatggctattactaaaaatgaaaaaataacagattctggcaaggttgcagagaaaagggaatgtttatacactgctggtgggaatataaattagtttagccattgtggaaagcagtgtaacaatttctcaaagaactcaaagcagaattaccattcaacccagcaatcctattactgagtatatacacaaaggaatgtaaatgattctatcataaagacacatgcacacatatgttcatcacagcactattcacaatagcaaagacacagaatcaacctaaatgcccatcaatcatagactggatttaaaatatgtagtacatacacaccatggaatactacacagccataaaaaagaacaagatcatgtcttttgcagcaacatggatggagtgggaggccattatcctaagtgagctaatatagaaacagaaagtcaaataccacatgttctcacccacaagtgggagctgaacatttagtacatatgcatacaaagtagggaacaacagahaggacctgcttgagggtagtgagagggaggaatgggaggatcgaaaaactacctaacaggtgctatgcttattacctgggtggtgaaataatctgtatgctaaactcctgtgacatgcaatttacctgtataacaaacctacacacgtactcttgaatctaaaatataactttaaaaaaaataagtaggactgacttctcctcctcttgtatcagggcctacttgtgacttcacatgagtgtgtgaaccaagagaggactgtggaagggatgctttgtgagttctgagccttggtcaagaaaagtcatgtagcttccacctggttctctagagcaccaagctgtcaagcaaaaagtgcagctaccacaaagtcaccatactagagtgagagtcccagcttagcacagccttccagccaacacatcaccgcaaattgctacacatggaagtgaaattattgtggcagtacatccttcagtccaaccatttaacacctccagtaccagccgatggccaagacatcactaagcagaagagccatcccatgggccctgcctgaatttgtgaccctcggtgttggtgagcatttataaaatggttgttgttttatgccactaagtttagggtgacttgttatgcagcaatagtaattagaacacccattcattaaataaatttgttaaccaaatcatagtgaaatcctatggcaccatcagaaatgatagtgtctttataataattaatatgtgaaaatcacattagcagaaatattcatatgtgcattggttgagaggtaacagacatgtctggaaggataatcacctaaaggtgatggtagttgcctttsgatgggggtgtgttttgagagtgttccttcattctttaccttgttctgctgcagcatagagttttctattcccctttccagttgtagactcatcttccagttgctgtgtgtgttggctgataaataactcacagttgtccttttttctggagaattgctcttggccaaatgaaagtctttttgccaagatgacactttatatccccagacctcagccaatgactgactgacacaaggaaatcagagccagcctcctcacttcaagggaggaccaactgtgtggtgtgatttctgctccagaacttcctgtgggatgagattaaagctggtctccagctgagactacatactgcttaaattctccccctgccctttcctgctacctcagtcccctcctcccaagaagactctccctacagatcacctggacaagactccccatttcaggcccagcctctgtagaatccattctaagacaaatatgtattatttttacaaataaatcacaataactaaacagcccaaaactaccaaaaaaagtgatgcatcaatcacatggcaggggttaagataaaattaaggcaatatgtacttatttgaaatttcagcagcccagattataaaatctctactaaggttatataaagtttctcaagcctcagaaggagcagggatcaaggaatcacatccatagtcgttccctttgttttaataacatcatttagggtattggtcattgtgattttcagaaaagtcaaacctgatgttatgctgtcttcactttcttttcttccttcctctaagcttctgtttctttggaaatgatcctatccttacctcataaaagtttttaattttccttctcattttatttctgctgcaagagaatgctatttgttggcatggtcccagcaatcaagctcctgggtaaaaaggtccagggcagaagataacagactgctttcatgggtagcgacatcttgcaaatgccttatttcaggggccctcttaggggaagctcacctctcccgggacaagtgagtacatgaagaattcacttgcgttggcctcacacttctgctctgtgcctccatggcctttggcataggttctgccatttttcttcagacagtcccctgaggacactgtaaggaaacttggtccagaaattttcaagacttggacaaatgccgttcagaaatgggtctgagaccaccagtacccaaagattcgttaaagtctcatcagaggaccactaatctccggtcctatctaaccttggcagaatggaagccaacgacagggaaagaaagatgtcctgctccatttctggattccccaagacatttagtctctatcccttctctgctttatgcatttatgttttcttcgaggaggataacgttggagtaaattgtaacccagtcacacctagaatgagtgcttaaaagagacacaattatctttatgatttgttttcttttttttttttttttttttttttttgagacagggtctcacgctattgcccaggctggagtgcaatggcaaaatcactgcttactttaacctccgcttcccaggttcgagccattctcatgcctcagcctcccgagtagctgggatactacaagcgtgtgtcaccacacccagctaatttttgtatttttagtagagacggggtttcatcatgttgcccaggctggtctcaaacacctgacctcaagtgatccaccctcctcggccttccaaagtgctgggattacaggcatgagctactgtgcccggcctccttatgatttaaaaaaaaaagaaaaaaagaaagaaaaaaaaaagatacagcccttcacaggtaggatgacagtgactcacaggtgtttctaaaacagaaatgcacatataggtgagcatatgcatatatatatgaagcattcttaaggctgctggagactgatgcatttttaaggccactggactggtctcagaaaatttccagaaaataattatctatgcagaatatctccaaggggcagcatcagattatgtctgaacacttaagacatatttgtagtaaatacacagcatgtggctttctttcataacatttttgtgagatattttatttaagctcttgcacatactgtaataagagagaaaagagacaaagggaaaaaaagagcaagcaataatcaccacctgtcagacttaacgtgcatttttatcctcagtttgcaatattactaatcacctcatttagattagaagcgtgccaagaaaagactatagttttatgacatttttataaagcatcaagcatcatgtatgctcaaaataactgttagagcatcatagccagtggttttatgtgtttcttcatttctattcaatgatgcaaatggtatccaaaattcttaccccatccttcccaaagtcttttaacagtaacatagattttacatacctattcctcattcagtcagtcaacaagcatattcattattaataataatatcaaacactgactaaaaaaaatacaatatgcaaggtaccaggctaagactttatgtatgtaaccagtatgttgatagaccaggacttttatgttgagtactagttagagactaggctatactggtttgaaaaagtgaccaaaatacaggaaggttacaggaaggttaaatgggaagggtgcttttctttttcaggacaacctagaggggaactgaccaaagttggcaagatagctctgccatctttaacatgctcttcgggtactagccatttcccagcaagcagaagggaagaaaaggaacgttcatgggaaacagcttatctttaagaaattcatgtaaaaatataaccatcagagctgagaaaactaagctgagcttattcattgccaggcaaaacaggctttcccttcccccacatccaatagaaagtggtagagcaggctgggagtggtggctcacacctgtaatcccaacactttgggaggccgaggcaggtggatcatgagatcaagagattgagaccatcttggccaacatggtgaaatcccatctctacttaacatacaaaaattagccaggtgtggtgacacacgcctgtagtctcagctactcaggaagctgagttaggagaattgcttgaacccgggaggcggaggttgcagtgagcagagatcgcaccactgcactccagcctgggcgacagagccagactctatctcaaaaaaaaaaaaaaaaaagtggtaaagtagtaacagtgtgtctacaataaactcccatttaggaaaagaaagaaaaggccaggcacggtggctcacgcctgtaatcccartactttgggaggtggaggcaggcgaatcacgaggtcaggagatcaataccatcctggctaacacagtgaaaccccgtctctactaaaaatacaaaaaaaaaaattagccaggtgtggtggcgggcgcctgtagtcccagctactcgggtggctgaggcaggagaatggcgtgaacccaggaggcggagcttgcagtgaacggaaatcgtgccaytgcactccagcctgggcaacagagcgactgactgaatctcaaaaaaaaaaaaaaaaaaaaaaaagcaagaaaaagaaaaagaaagaaaaggccaggcacggtggctcctgcctatgatcccagcactttgggaggctgagacaggcagatcacaaggtcaagagatcaagacaatcctggccaacatggtgaaaccctgtctctactaaaaatacaaaaattagccaggtgtggtgacacatgcttgcagtatcccagctactcgggaggctgaggcaggagaatcgcttgaacccaggaggtggaggttgcagtgagctgagttcgtgccactgcactccagcctggcaacacagagagactctgtaaaaaaaaaaaaaaaagaaagaaagaaagaaagaaaaataaaaggggaaactcagcatcccctggtccacagcaatgatgacatcctgctaagtagtcattgtaagacccccctaccccagcagaggaacaggtaacctacattgtgatgtctgggaatgattccctgtcaattgccctctgcgctcctggctttgccctctggaagagccctctttatcagttagtctctgtagccccagctgaagacgttggagagtatgcccttctaggcaacagatttcctgatttcctgctcttgcgtgcttgagagtttgatggattccttagggatcagaacattcacaggcttttgtcagctagggttttagtttcttggggaatacaactacttgcaaaatttagtagacagcctattttcttccaatcagttccatgcagtggtgttttgggtctggcttacatcggcttgtaggagcctattgtgcacatctttttccaactccacacaatcagtgacacaccctgtaggtatcatgaaataggtcatgggtgggagcatttataccttggaagtaaaaaaaaaaaaaaaagagagagaacttaccagcttcactggtaagtgagtagctgggactacaggcgtgcgtcaccacacctggctaatttttgtattttaagtagagatgggatttcaccatattggccaagatggtctggtaaaaaaacatttaccagcttcactgattctatatgaaagtaatcattattcccaagatctcttctggacaagcttcctaagcctgctggctctccccttccttattggcttctagttcaacccattctcctctcccatatttgaacaggagctgtcttgttaaggcttgaatcagaaggccataattttcaaatgatcgttgtctgagggctacctcccacgagctgagagtcttaataggacacctctgaaaaaagttatgaataagtctatctcctgctattccaggtaaagatagagctggcttttccaaccttgctggcctcaaatctctggaccttcaatttagattaaaaatcaaaggcagaaaaagcctcctttagcacagcttcaattctttccatctctgcttaaaactggccaattcttgcgcaagctcatttcttccttctgaaatcttgctaaatgcagaaggaaacagttaacacacatgatagtctacctttttctgaccacttctctaaagtggtctgtcctctacgtcattgcaggtgacactttaccaaacatattgccaaggccttaaaaaatgctcatgacccttccagccttctagccttaatatgttccttggttaccttctacttgacaactaagacagaccacatattttaaagattttctgtgacaacagcaacataaatttaggcactaatttctatattaactagggtatgtattaagctttataacaaagatatagaatatgcaaagtcctaaataaacacagtttatttttcttttatactatcccagagctaagcagtctaaagctggcagtgtagctctgctagcttcaatttgtggcccagattgctccattattactattccctatccataaggaaaagagcttatctttttttattatactttaagttctagggtacatgtgcacaatgtgcaggtttgttacatatgtacacatgtgccatgttggtgtgctgcacccagtaactcgtcattaggtatacattaggtatatctcctaatgctatccctcccccctccccccaccccacaacaggccccagtgtgtgatgttccccactgtgtccaagtgttctcattgttcaattcccacctatgagtgagaacatgcagtgtttggttttctgtccttgtgacagtttgtgcagaataatggtttccagcttcatccatgtccctacaaaggacatgaactcatcctttttatgactgcatagtataccatggagtatatctgccacattttcttaatccagtctatcattgatggacatttgggttggttctacgtctytgttattgtgaatagtgccacaataaacatacgtgtgcatgtgtctttacagcagcatgatttataatcctttgggtatatacccagtaatgggatggctgggtcaaatggtatttctagttctagatccttgaggaatcaccacactgtcttccacaatggttgaactagtttacactcccaccaacagtgtaaaaatgttcctatttctccacatcctctccagcatctgttgtttcctgactttttaatgatcatcattctaactggtgtgagatggcatctcactgtggttttgatttgcatttctctgatggccagtgatgacgagcattttttcatgtgtctgttggctgcataaatgtcttcttttgagaagtgtctgttcatgtccttcccccactttttgatggggttgtttattttcttgtaaatttgtttaagttctttgtagattccggatattagccctttgtcagatgggtagattgtgaaaattttctcccattctgtaggttgcctgttcactctgatggtggtttcttttgctgtacagaagctctttagtttaattagatcccatttgtctattttggcttttgttgccattgtttttggtgttttagtcatgaagtctttgcttaggcctatgtcctgaatggtattgcctaggttttcttctagggtttttatggttttaggtctaacatttaagtctttcatccatcttgaattaatttatgtataaggtgtaaggaagggatccagtttcagctttctacatatggctagccagttttcccagcaccatttattaaatagggaatccttgccccatttcttgtttttgtcaggtttgtcaaagatcagatggttgtagatgtgtggtattatttctgagagctcttttctgttccattggtctatatctctgttttggtaccactaccatgctgttttggttactgtagccttgtaatatagtttgaagtcaggtagcttgatgcatccagctttgttcttttggcttaggattgtcttggcaatgtgggctcttttttggttccatatgaactttaaagtagtttcttccgattctgtgaaggaagtcattggtagcttgatggggatggcactgaatctataaatcaccttgggcagtatggctattttcacaatattgattcttcctacccatgagcatggaatgttcttccatttgtttgtgtcctcttttatttcgttgagcagcggtttgtagttctccctgaagaggtccttcacatcccttgtaagttggattcctaggtattttattctctttgaagtaattgtgaatgggagttcactcatgatttggctctctgtttgtctgttattggtgtataggagcttatttttaagaaagtgacctagaagttgcataaagtgcttccacccacatctcactggtccaaatctagtcatgtggccacaattaactacaaggaaggtgtcttagtctgtttgagcagctacaacaaaataccacaaactcggtggcttataaaaaccatacatttatttcctactgttctggagctgggaagtccaagatcaaggtaccacatctgatggctggtgagggcttatttcctggctcatagaaggcatcttcttgttgtgtcctcacatgttagaaagagacaaggcagctctctgggacctcttttataagagaacgaatcccattcatgaggattctaccatcatgagacctaatcaccttccaaaggccccacctcctaatatcctcagatcggggatggtttcaacaaatgaattttggagagactaaaacattcagacagtagcagaatcctagaatgtagtcactagtggaaattcacatccctagttaaaaattagagggcttttttactaataaggaaaacaaatggacttgaaattgtgaacaattcgtggtccctccgcaagcctaagtagaaaagaagatataatttatcacgtcagttcctgcatattggctctagaaagcagttctctgaccacttgagtaaaatctagagtcagccttatgattttctgattactctcaaattgtaaaaagtctactggtcactatggtcccccaaaatagtctcagttcactaattcgtatgtttagtccagtataataattaaaactcaaacatccattgaaagttaaagcttctcctccttgtgagcttaggtctgctgaaggtgaaaaacctacatcggaaacaagcatggagttggtttcttttctacgtctcttcccatggtcctaaccatcttaacccaagtcaaaaacagcagtcgcttattcctccacggttagtcacttgcccgttgactcacttctctgcatcgatttaataagagttcacagctctgctgcctttgttttgatggagatgcctacagaattgttaccagatctctgattcaaacctggtgcccagacagccttttcagcaaaagtataaattgctccccagatgactgatctttgtgccatcaggagcatgaagaatgttgcatgatatttctaatggttagagggtgaggtgtaaatttataattagacatgtttcttgggaagaagaagaaaataaaaatttttgaacaaaggtattacataactggttcttttccacttggtagggcttttatagtatttgaaataagcagttacaagacttgagctagtttttcactaggtttctttatgataggaaaaattatcattgttctagtttaaacatttattagtatatatrtctcagtttatagatatttctcctcacctactaaatttcagagatgctattcaaaggaaattaacactaaattttccagcagaatctgtgatatagagaaaggaaataagccatactcaatttgcattatagaacctctatcattatgacggtgaggcatttgcattattacagttgcagtgctatttaggaaattgcctatttgattattcctcaaaatagagtattaaaatagtggaagggtccaatattcattgtctacagagacaagcctagggcagaatgaaaaattaattgttcattcccagaacccaacatctttctgaatttgattctttgaaaacacagaggaaaagattctggaaaaaaaaaaaatgtttcctctaaaagctgttgaaaataggaatatcatcaaaaagtctcaaagataggaaacaaagttagtggtttataccataatattaggcatgaattcttactgcttacattttctgccagttcatctctaaagatgggtgactataagacagaggaagaaagtagtaaagaatcaatgtcatggagcaatcgaattgtgtagaagtcacttaagaggaaatacgtacaccatttccccaccacagctactttaatttagttgatgtgtttttgtttttttttttcctacagggaatgcctctataacattactattttattttaagttctgggatgcatgtgcaggatatgtaggtttgctacataggtaaacacgtgccatggtggtttgctgcacctatcaacccatcacctaggtattcagctcaacatgcattaactattttcttttcttttcttttttgtgtgtgtgttgttgttgttgttgttattgtgagacagagtctcactcttcgcccaggctagaatacagtggcgtgatcccagatcactgcaacctcygcctgctgggtccatgctattctactgccttagcctcccaagtagctgggattacaggcatgcaccactacaactggctaacttttgtgtttttagtagagacggggtttcgccatgttggccaggctggtctcaaacccctgacctcaggtgatccacctgtctcggcctcccaaagtgctaggattattggtgtgagccaccacccccggccttattttcataatataatcagtaataaaaaaaatagctaacatctgaggctatgtatgtcagcctttgttctaagtgattttatatatttgtgtgtgtaggtatgaatacagatatgagccacataatgacgttttggtcaacagacagcatatatgatggtggtcccatacaattaaaatgaagctgaaaaaatccctatagcttactgacatcatagccattataaagttatagtccaacacattgctcatgtgtttctggtgatgctggtgtaggcaaacctactgtgctgccagtcgtataaaagtatagcacatacaattatgtacagtccataattcttgataatgataataaaggactatgttattggtttatgtacttactataccatacttttattgtcacttaagtgtactccttctacttattaaaaaaatgtgaactgtaaaacagccccaggcaggtccttcagggcgtattccagaagacagtattgttttcataggcaatgacagttccatgtgtgttattgcccctaaagtccttccagtgggacaagatgtgggagtggaagacaatgatattgatgatcgtgaccctgagctaatgtatgtgtttgtgtcttggttttttaacagaaatcatttaaaagttctaaaaattttttaaatttaaagatagaaaaaaaattatagaataagaatataaagaaaatatttttgtacattggagtaacgtgtgttttaagtgaagcattattacaaaagactaaaagtataaaaaatttaaaaatttataaagtaaaaatgttaaagtaagctaaggttaatttagtatcaaagaaagaaatttttttctatatttagtgtagcctaagcatacagtgtttaaaaagtctatgggagtatacagtaatgacctaggccttcacattcactcaccactcactcactgactcacccagaacaactttcagtcctgcaagctccattcatggtaactgatatacaggtatatcattttttatcttttatgccatatttttaccatatttttgttttaatatgtttagatacacaaatatcactgtattacaattacctataggattcagtacagtaacaggcagtacagatttgcagcctaggagcgatagtctataccatacaacctaggtgtgtggtaggctatgccatctaggtttgtgtaagtacaccctatgaggtctgcgcaatgacaaaaacctgacagcgcatttctcagaatgtgttcctgtcattaagtgatgcatgcctgtacatatagataaatacatacgaagttacttcattttttaaccctatgagatgaagtagattctattatcccagttttccagatgggtaaaccaggcacagaaacatcaggtaacttgcccaagtttgtgcagtggcacaatctggactcactgcaacctccacctcccgggttcaagtgattctcctgcctcagcctcccgaatagctgggattataggcgtgtaccattacgcccagctaatttttgtatttttagtagagatggggtttcaccatgttggccgggctggtctcgaactcctgacctcaaatgatccrcccacctcggcctcccaaattgcttcaattacaggcctgagccaccatgtcaagccccgagttcttacagcaagtaacactggaggtgggatacaaacccaggctcaaaagtccatgcatctcatgcaccttctctgataatagaaatagtcattgtgggctgggcacattggctcatgctttaatcccagtactttgggagactgaggcgggcacatcacaaggtcaagagatggagaccatcctggccaacatggcgaaaccccctctccactaaaaacacaaaaattagctaggcatggtggtgcatgcctgtagtcccagctacttaggaggctgaggcaagagaatcgtttcaacccaggaggctgagattgcagtgagctgagatcgtgccattgcactccagcctggtgacagaacgagactccatctcaaaaaataaataaattaaaaaaaagaaatagtcattgtggcagaaggtagttcccaactattcactcctctttcctataagagaatggaatatatatatatatatattcattgtcatgagacctgcagtgcctttggtggcacttctatacttcctttccctctaatggcaggcttggtcatgtgatttactttagccaatggaatgtcaatcttccaagttcctgcagaagtttgaagaggcatcagtttcctcaaattctcaatctctctgtctctgccatgaataaaacagtccccacatagatgctgctccatctgactcacagctattgagtacaataagctatactatagcttattaatatagtatactatataatatactatagcttatttatatatactaagctatataatatagctatactatatattattatagtatagctataagctatactatagctatataataagctattgagaataaatctttttgttgtaatctaataaatctaataaaatctggggattatttgttgctgcaggacagctgattagtgtggttaccatctcctgaggccaagtgagttgaaacaaattatcaaattttgccaagtacaatactttgttcttcctaatccacaaaggtaacttgtgtaaatctgagtacgtcaagaatcttcacgtttatcaggaaaatatcattatctgcaggtaatctcagattttaagtaactgggccaagatcacagaattagtattgcaaagccagcccaaccctcatctgtttgtgcagccccaagccacaggtcttttttatgatactgcattgcatcttcttccagaaggagagaaaaccgggacgattcatattgcctacagagagtttgtgacattacagcttgaaacagaatctccaaccttcaaccaacttgagctagatgtacccctaaattgctggatgtgtcacagtattttgtttcatgtattaatctaaaaaatcatatcatattgtttagaaagaattgccacttctaactgtggctgattatgctctccaaacttacacgccaccgtaagaaacctactgtatattttatcaatacttgatttttatttaaggacttggttcattcaggtacccatttattaccccctatgaattctgaaagacacagtattacatgttgcagattggaaaatacagttcgacttgagggttcagagctatggaggtaaaatgtagcataatcagtatagaaatcaggcagcatcacactcttgtcaactaccaatgtcctgagcagacaatcttcagggcaacgtggaaaaaaatacattattggacaattttcatcagatagacactagctcaaattaaattaattctccaggcaatctaaaaatcataaggaaaagatatttggttgttcctcaatttttttttactcttttattatctcctctcttctcttccatctacttttaatataagctaaatcagcttttgtgggttttgtttgtgtttttaaatttaggctaccgtttaagacagagaaatcttgaaaatatattcattctacattgctaaaagtccattcctctaccctggggaatttttatttgagtcatgatattatcttggtcctttatagaatgcatacccttacatttcacttttgacaatgacaagctatagctgtttactacttttcaagatttaaaagaagcagctgaaaagtcagaaatgctcaagaaatgagaatagatcactgcaaattgttctgaatctccctttggtgaaagaatcagagaatgatttttattcaaatccttggccattatatttagatgcatgtttagaaaatggaaaattagcaataaagtgttttgtgagattcaattccattgccatcatgccactgatgggctttctgtttttgttttatacctgagtaacaacatcctcctctcttatttccctggtaattttcttctattattgggaaaatatttcttcaagaatctgatgtcagctaggagaactgagattcttattactcttttctaaaataggttttctgtgggcaaattcattagaatcttatccccttataattcatcagtcctggagaacctaagctgtgacagtgtgcgaggctgcttgtgattgtgaaagtcagagaagaagaaaacattacttaaagttacctagaggtattaccgacttgtaggattttttttttaaggcaaaacatgtttataggattatggcctcattccctgcttctgtctcatagggctgggtgaacttaggaatgccagaaactccaattctcagttaaagggyctgaaaaaggcagacacaactgaaaagggagtagcaagatatctacgggtcgcatatgccaagtaactagccattgaacttgagcaaaccagaacccacactgatccactgtgttctcaactataatataaaggtgttgaaggcacaaatcactcaagtctcttccatctcctgcactcgccatctttataccatgcttcagctacactcttagtttgctttgtcttgttaagaattaaatgtaatcccagcactttgggaggccgagacgggcgaattgcctgaggtcaggagttcgagaccagcctggctaacatggtgaaaccctgtctctactaaaaatacaaaaattagccaggcatggtggtgtgtgcctgtaatcccagctacttggaaggctgaggcaggagaattgctggaacccaggaggcagaggttgcagtgagctgagatcacgccactgcaccccagcctgggtaacagagcaagactccatctccaaaaaaaaaaaaaaaattaaaaaaaattaaaaatattgttagggaagagcctctagcaagaagattttagagtagcaaaaaaacaggttaatgtcaagaattatccagggattttaatgcccagggttcacataaagaaagaatagttatttaagccaaaattgatttaaaccagtcaattttttgttatttcacttctaggggtcaggaggggaaagagaatgctcaataaactaaactaattcagaagatgctggagcttggagccagactgaataggcgatgggaagcccctcaaaatcctgcaaagatgtggaattcacaccacacaggagattgagggttccagtcaaattcatctggatctcaaagaacagaacaacctcagcagacacctagctagtgggcaggtaaatgtaagacatttttaaaatagtccaatgtatcttatgtcttgacttggaggaacatattttttaatttttaatgtttcttgttacttttacatttccctcttattttgtttgagaaggtaacyggtatattagcaagatctcaggctttagaatcaaytatccttcagtttgtattttagctttgctgattacttagcctttggagacccactttcttcgcttccaaaatgaatataaaagtactaccagccaggcgtggtggctcatgcctgtaatcccagcactttgggaggccaaggcgggtggatcatctcaggtcaggagtttgacaccagcctggccaatatggtgaaaccccatctctactaaaaatacaaaaaattagctgagcatgatggtgcacgcctgtaatctcagctacttgggaggcagaggcaggagaatcacttgaacctgggaggcagaggttgcagtgagctgagatcacaccatcgcactccagcctgggcaacaagagtgaaattccgtctcaaaaacaaacaaacaaaaagcactacctactttacatggttgttgtaaggatctgaaataacaaatttgaaattcattaacacatagtagatacttaaagatttactacttttaaaactctttcccaagtgtttactgagtcagggtatgtgaaggatctaccttagccaatgtggggctttagtaggttaataagagatgatgagtaacctcaggccatttagaaatgttaaattagagaaaaacaaaaacagagctctgggtatcttatgtggcttctgtgcctgctgtgtgagctcattttggcaccttgatccattaggcaagtcatggattgattcaaacctaggaaatgggttattctcagaaagcttcccatccaggatgcaggtgctgcataaacactttgctaggatgatgagctcccctaaaagctccacgtgcaccagatatgtaataggagctggctgccccccttaattagagttttaaaacacagtttagagccacaaaatagttcaaatttgtttttcacttggttatctctcaggaaccattgtggaagtctgttaaaacgtggcaaacatcatctgttcagccacgcttttgcttctgctttaaattaacagcaatcttgggttttagttcattagaatattctgaatagagataaattaattaatggatccaacaaccagcatcagcgtgctcatacttcaaaaggatagtactcttttttaatgcctccaatwtcttattaggaaaaacaggtcaaattaagacaaactaattcagctcaatttgtctcttttcagcttcaggtcttataagattgtaaaagcccacacctatccagatcgaattttatgtaaatttattgaactatcaaactccttgtgaactacactggaatgaatgcctgagtacataatacctttaatttatataaaggctgctttcagaaggcctttaacgtttcacaaaggttattaatcctcagaacaatcttttgaagttggtagggagaataatttaccaaggtgcacagtaaccttgaaggaaatactttctcattaaaggtaagttcagtaaaatggtacagctgctgtgcaaagcaatttggtagtgccttaataagctaaataaaaaattactgtgtgacctagtaattccactcctggatatacactccaaagcaatgaaaacaggtgttcaaatgaaaacttgcacacagttgctcatagcagcactattcacgatagccaaaaagtagaaacaacccagatgcccatcaactgaaaaatgaataaataaaatgtgggatatccatacaataaagtattattcagccataaaaagaaaggatgcactaatgcaatatrgacgaaacctaaaaaatactatgctaagtgaaaagccagatacaaaaattgtattgttccatttatatgaaaaattcagaattgacaaatccataaagtatattagcagttgtcaggatctggggaggaagagatgaggtatggtttaatggatacagcgtttcatttgggggtgatgaaaatgttctggaactaggtagtcatggtggtcgcatcacactataaagtgctaagtgtcactaatggtcaattatatgttatgtgtattctaccacagcttttatttttaactttcaagttagttcaattatcaggtttctggaagggcttaaccatagtcctgctcaaaatctaagagggctattgacagctgcagggttctcacgggccttgggttctagagaaataaataaagcccaatttaagtaatttccacaattccatgatgtgagatttttccttcaagcctgaagatttcctacattcttaaagtctttcctgacctcttccactcccaggccaactgagctgcgtgtttctctctctttaatttcaccaaactaccaggtcacatcataactttgctgacttgtccccttccccgccagactccgggttccttgaggcctgcaacttttccttgtactctgccttgtamcctgctttggcacatgggaaagtttccaaaaattactctatcttatatgttaaaatgataaccatacgctgctcccaaattattaacctgttaattcacgaagtaatccttctaataaagggtatatcagtttttcttccaataaactgaaaccagggctttgcagggcagtgtcagacatgaaaagcagcacctttagacatgactcyggttatacaatattacctcgtgaataaatgtattgagagcaacatgcaatttttgggacttttactgtttgctctttaatttctaattctgtgaaaacgaatcaactagtgactaaactgaacaaactcaaactattcccaggctactgatgctcataaaatcctgtgaccttaatgccatgactagagtgagcatcagtaagaacagtttggggacggattgaggagaataaaagctatgatgggataatgtgttgacactaacgtaaaaggagaaggttaaaatgaagacaggaaaaagggaggaattacttaagagcattaacataatcattttttatatgcaggtggcatggcttttcttggcataacttaggatcggcctacacagaaaactggtgcttattgttagttactgctctataaggtctattgttcaactgtcctaaagccaaaagtcatcactgccggcagccatcactgaacctaattgccttacagttaatgagccaataaaatgagttaacttatctagtttctagccacgtatatggcaaacaatttgtcttcaatggaacaccagaaatagattaaattatcttttttgttgttgctattagctgctagaaagcttagagctcaacattcaacttattgtttgcaagtatccaagacyagatatttcaagtactgactgctgtgatttgaatgtgttccccagaaattcaagtgttagaaacttaatccctaatgcaacggtgttgggatgtggggcctagaaggcgtttaggtcatgagggctctgacctcatgcatggattaataccattctgaaaaaggctcatacaggagtttgaggctacagtgagctatgattgtaccactacactctagtctgagcgacacaaaaaaagggctcatggaagtaggtgctctctctctcttacccttctcccttttagcaagtcaggacatagcattcttcccctccatagtatgcagcaaggccctccccagaggccagggccttaatcttggacttcccagtctccagaaatatgggaaataaatttctgttttttataaattacmcattctgtggtattctgttatagcagcacaaacagaatgagaccctaaacttgctccactgtcaaccattctgcagttttatttctctttgtccaaccatctcattcatgtcttttattctgtttttacattgcatatatacttgtaggttgccataaatcttttttatttatttatttgttttgagacggagtcttgctcttttgcccaggctggagtgcagtggcgcgatctcggctcactgcaagctctgcctcccgggtttaagccattctcctgcctcagcctcccgagtagctgggaccacaggcacctgccaccacgcccggctaattttttgtatttttagtagagacggggtttcaccgtgttagccaggatggtctcaatctcctgacctcgtgatccaaccacctcggcctcccaaagtgctgggattacaggcgtgagccaccgcgcctggcccataaatctttttaaaacaaggcactccattaatatagatawcaactacatctttaataaattagcaagtgaataaacagttttatttcattttccttcttcccttcttttctcccttcctccccacctcccttccttctttccttccttccttccttctgtactaataatattacagagatcttaaggatactcattgcttaaaataggagagtcataaagagcagaggtataaaagcaagtcacaatagcatgcaaacattagggtctttcacattctttaagatgaaaattaaagaggagattttcctcatattacagtcttgttaaagatgtcaagacctgcatttcccacagtttctcagatgtgattgcttcaattattctagttactctagattctgcccattctaccctacacaagtagaaagaaataggaacacacacatacacatacatattccaaatatatttagtcaattagttgaatgaatttgtagagttgttctcaaaataactggatgtataaataaattctactatttctacctcttactgcgacgttgtatgtggagacaagtctatggactggggtgatgagatcatgtctctgattacgaatacttacggtatttccctttgtaaaggcaatgagagtaatgaaagaagtgagacaagttacatgctttttcaacttcttaccacaatgtcccagtaattatcttttcttagattaaaaatttcatgattaacatcagtttaagcaaacaagaccttttgaactttctatcttcttctgttaatattaataaagagcatcctttcaaaaaaagtgaaggtcaaatgtcatcctctattctatcaaatgacgtagcattctatgatacattacttcattggtccttacaaactaacagctcctaaaatatgatgagataggcagcttcagctagggctacatacattttcccacctgaaacaaacaaaataaacacagacaaaatatatgaaataaaagttttgaacacattaggcaacaaaggtcagtgatctctgaaagatggaaaacaaacatgggaatccctacaagtgacccagatgactgccttaagaagttcgaggcttcaatgcagggagtagcctgacaagctctctgagttgaagagatagagttgagagcatgatgaccaaygaagctaaagattgcaggacagaaaggtgaggaaagagactcaagatcttcaggggatatgccctgataattcaccagaatgtttataaacacatgcatataagaaaattgcccatgtgcacagaaagaaygatctgaaagggctaaaggaaacccagtcttcacasaggctgggaatagcgcctgtctccaacagccatagtggaaatttttataattcataagaccttggacagagtactcagaaggatcttgcctccatagctgggaatagttaacagtagactaaatgctgctctggttccatctaacaactatgaaaagcagaaactgaaaggatcaaatggtttctaagtaatgtaactgcatcccagaaaaaaaactgcaagaatatttataggaacacaaaaatatctggcacacaagaatgtgaaatttataatgtctggcattccaattaaggattctaggcataaaaagaagcaggaaaatatgatccataatgagaagaaaaatcgatcaattgaagccaatctagaactaacattgatactaaaattgacagataaacaccttaaaacagttactataaaattattctatatgctttaaaagataagtggaaacatggaagatatggaaaatttctagacatgaaaactataatgtgggagatcaaaagtataatggatgggatcactagccgattagatactgcagaaaaataattaatgggcttgaagatatggcaatagaaaccactcgaaacacagagagaaagtaaatttttaaaaaatgaaaagagtgggccgggcacggttgctcatgcctgtaatcccagcactttgggrggccgaggcgggcagatcacgaggtcaggagatcgagaccatcccggctaacacggtgaaacccagtctctactaaaaatacaaaaaattagctgggcatggtggcaggcgcctgtagtcccagctactcgggaggctgaggcaggagactcgcttgaacccgagaggcggaggtggcagtgagccgagatcgcaccactgcactccagcatggccaacagtgagactctgcctcaaaaaaaaaaaaaaaaaaaaaaaaaaaatgaaaagagcatcagtgggctataggacaacttcaagaggtctaatatacatataagtagattctccaaggaaaagggatagaaagaaaaaaatacttaaagtgatgataaaattgtttacaaatttaacgaaaactataaaccttgagaccctcaaaaattcacaatacccaagcacaagaaacacaaagatagacacatcaaagtacatcataatcaaattgctaaagaccagtaataaaaagaaaaatcttaaatgcagccgacacactacctacagaggaacaaagataaaaatgacagtagaattctcactggaaatgatgcaagcaagagacagtgaagaatcatctttaaagcactgaaagaaaagactgtcagccccaagtctatacttaataaaaatatatttcaaaaacaaaaagaagtaaaaactttttcaggcatacaaaagttaaaagagttcattatcagcttacctgcactacaaaaaaaaaaaatgttaaaggaaataattcaggcattaaaaaaataataccagatggaaacatgggtctatacaaaacaatgcagagcactagaaaacgccataaccactacattcctagaatggaacctctttcaatgttgaccgcacccctgcctaagtgagggcccatgtgcagaataagaagagcggtccagccctgacgtggcatgacttaagacctgcttgggagagcacaatgtgttcaacatcagttgaagaaaataagtgatattgctaacaaaggcacattagaatcatggaatagaagccttgaaagcactcaaaggagataggcacagtcaaatctggatgattccctgacacgaggcatagatcctgtggggaagatgggtgacagtggtgggaggacacagggctgccctcaggtgctgtagactggatgttcaccatggtaagaaaaagaccatgaagggaaaaagctggtgcatggctattgatttttggttgcccagtgccccagatacttcctgttttctgatgggaataaatatcacccaaaatcagcatgtcagcaccagtctagttggccaatatcatacaatcccacaatagaaatacctcaccattcagcaagaatgatcctctcaccaagtcactgtcctagggccagagtctcaagacagtcccctagttttgagtctcagagtttctcggggcatcatgttgacccattgcagggggaaggggctgactgcctgagtttaacaatgggtgctgtctaggcagggcatggtggctcacgcctgtaatcccagcacttcgggaggccaaggcaggtagatcacttgaggtcaggagctccagaccagcctggccaacatggtgaaatcctgtctctactaaaagtacaaaaattagccgagcatggtggcacatgcctgtaatcccagctactcgagaggctgagacagaaaaagcgcttgaacccaagaggcggaggttgcaggagatggcgccactgcactccagcctgggctacatagcgagacttcatctcaaaaaaaaaataaaaaataaaaaataaaaaaaagaatggtgctgcccataatagccctttaactatgtgaaagaaattatcatcttagccctatgtcttctcacctacaaaatagctatctcagtttctttaactactcccatgagttgaaggatgattttataagtaaagaaatataaaaaatgccacttttttatgtgtaagaccatctgtaccctgacagggtctttcttaattatgctgtacagatgataatctgtagtatttgtatatttgttttgcactcatatcatgagtattgaaactatttgagtcaaaattattctacatgtcacttattaaatgaaaatgtgatcacatagccaatgatagtcatttttggtatgctttaaggcctatgaataagatgttgactactttgtaattggtaccagtcatttgtaattctgacagaaagatacagatttattatattttaacatttttacttcggtgccttgatgatgaatttaattttgaaacatttcaggattacttaattcaagtttcaaaatagaactsaacttcatttaagttggcatttcattgatttaaaacatgaagtccactttctgtaattctccatgggattaaataagagagagactatccaattgatttttttatggcatccccttagtagatatgaatttctattatatagatatacactgtttttttaacatgcttttaaatccaatgaattgtattttcgttgtaagcatgatttttactaaaagataagaatcactagaaagtgaagtttttactatagtatagacgacccatctaaatttctggccctgaaattttcattttcgatgaaatcgaaatgtcatctctaccacacttcagttacatcctggaatttgtcatggcctagaaatgcttcagcttcatcttactctctcaccttaaccccttattttgactgttactcaatttctcttactatagctattttcagcctgtcccttgaacccctctgctgcctgcctccagtcaccttaagtctttaatctttactcaaagcacactttatttcatcatctttgcatccattctgttgaaatattttcagttttattgccaccttgtccatagtctgcttatgcatgacagaatatgaatcctgctttaatgtatctattcacctttcacagttaatcctgggctgctgtacatttattgccaacataaattcatgatcaccaacctcaactaagttctcaacagtgcttataatctttctgagttttggtaatgcactctcattttccattttttcctgtttgtttcctacggatgccataacaaattgccacaaactggatggctcaaaacgagagaaattttttctctcacagttctggaggcctgaagtccaaaatcaaggagtcagcagggttagtcctctgagcactctgagggagaatctgtctgtcccacaattctcctctagtttctgatggttgccaacaaacctcagcatctctgtctttttgttttctttttttttatttttttttttttgagacagagtctcgctctgtcacccaggctggagtgcagtggcgtgatctcagcaacttttgcctcctaggttcaagcgattctcgtgcttcagcctcccaagtagctgcaactataggcatgcaccatcacgtctggctaatttttatatttttagtagagacaaggtttcaccccattggtcagactggtctcaaactcctggcctcaagtgatccacccacctcagcctcccaaagtgctgggtttacaggtgtgagccaccgcacccggccaaacctcagcattccctggcttgtaggtgcagcattccactctcttcttgtcttcacatggtgttctctctgtgtatctttttgtgtcttcacatggccatcttcccactgtttgcatccgtgtcactgtttctctcttcttagaaggacactagtcatcagatttagggcccacactagcccaaaatgaccttatcttaattaattgcatctgcaaagaccctatttccaaataaggtctcattctgaagttctaggtggacatctattttggaaggatactattcaacccaatacaccagctatttcaaattgttcccactttcctcagatctcagatcccatcatttatttcttcttcactgtaggcacacaaccttgaatccttgaattttactacttcacagacaacggaagccatcaagaattctctcaacttttcatcaactgatacatttacctggccctctaccatgcccacttataacaatggatgtggcgttcctcttccaatcttaagctttatacctgtactttgtagacccttccctctcactttctcaaggccctcactctatcactgacttctactcttatttacatcattgatctctactcttatttggctatccattaacatttaagcacactcaaatatctcacttagaaaaaataactaaaaagaaacttgacatcacatttttgcctagctactgagctatctcctcctttcctcttaaaaaccaaactatttgaaagaatgttatacattcactgttttcattttcgcatctcctgcttactccttaacccattattactcagattctacacctaccattccacagaaattgttctttccaaggtcttcaatggcctttatgtcactaaatttaaaagatatttttagtctatcatacttgaccactagacaagccctcattactagttttctttgacaccatactctctctctctttaatagcttttcagacgtctttgtagggtcctctttttctgcccagccatcagatgttgacatttatgatgattctatccaattcctcttttctctcctcttggttttagttaatttcttccactgccatgggtttcaaatgccatttaatattgcctatttgatgtctctacttaaatgtatcaaagacacctcaaactcaatagtccaaaactgaactctcatgtctccccattccaaagtcccatcctcttctggtgccctctactgtcataaatgatattaccatctactcatctttccatgctaaaaatgagggcattatcttcattatcttatctccaacttctccctcactcccacatccaattacttaccaaaaattattgattattcttctcctaattatttctwagttaggactactctctgcatcctcactaacaccaccctactccagtctcttatcgtctgacctatttgctggccctaaacctaatccaactcccctcagattcattctttccacactgctgccagagagatgcttattcaaagcaaatatgagaatcctctacttaaatctcatgaatgaattmcagttttaagatggagtagagatcttctggaactctattccagaaagaaacaggaattcagatttcatctttgattaaatcagaaataaatagaacttgaaatgggggaaaacagaaaacgagatgaagaaaaaaagttgatagaaaaatgctacaaaacccagcagagcagggaaagtcagacatgagtgcctgcaaattaagaatttcataagaagcaagcaaaattgcccacatagaaccctagaaagctgcaagttccaggtaatacaggaagtagagatgagatgatagtagaagtgtttttacagagctgtggaatgatatgagaagattcggccaaagattcaaagaaagctaagcagaacaagcaatgtaattatcaacatcaaaggaaatgaaaatttatacaagaagaaaatataatcacagtccactacttgactcagcatggaacaataattaaaattataaatagaaatgtaagaaaaatacaaaatagtcgtattagaaagaataaagggattaggaagagaaagcataagagatataaaattctcctttgtcaaatggaatcaaccttgatgcccatcaacgatggattagattgaaaaaaaatgtggtacgtattcaccatggaatactatgtagccataaaaaagaacaaaatcatgtccttgcagcaacatggatgcagctggaggctgttatcctaagcaaattgacataggaacagaaaaccaaataccacatgttctcacttataagtgggagctaaactttaggtactcatggacacaaaaatggcaaaatagacatgggggtctactaaaaggggagagaaagggagggaggcaagcattgaaaaactaccgggcactatgctcagtatctcggtgctgagattaaccatgcccctaacctcagcctcacgcaatatacccaggtaaaaagaatctgcacatataccccctgaatctaaaataaaaattgacattataaataaataaataaataaaattcttctttgtcataataggaagacataatgtctaaaatctataaaacaaagatgcttactcacattatctagaaggtaaaagaattggaagtggccaggcccggtggctcatgcctgtcatcctagcactttgggaggccaaggtgggcgggtcacttgatgttaggagttcaaaaccagcctggccaacatggtgaaaccccatctctactttttttctctaagaaaacaaaaaagttagccagatgtggtggtgagcacctgtaatcccagctactcgggaggctgaggcaggagaatcgcttgaacccggaaggcggagtttgcagagagcagaaatcatgcctctgcactccagtctgggtgacagagggagactctgtctcggaaaaaaaaaaattggaagtagtttcctttggggtgaggggccatgatgccttcaagggactgataatttttgtgtaagacttttagaattatttaattatttgtatattatgtgcaagtattgctataataaaagttaaattttaaaatatttttcaatggtttacccaggctcttaggatacagtctgaaccccaaagcatggcttgtgaggcctgtcatgatatgtccacctctgtcaaccacttcagccacacttcttaacaccttcattctttcttctaagcaccaactatattgagctttctttactccctaatacagatgatgactttgctcacctctagcaccttctatgagctgttgtttctctctaggattgctacctgctcctcctcccaaccttctcttggctatgctccaaaacgccttctctcttgtaccacatccaaggtaagtttgcttcctattcactcccttagcactcaactttcccctaagacagcatctaccacatgtatcataatatcttattgaattatctgttccccaccctgccatctagactacaagcaacatgagagcccaatcccatcttttcaggtttattgtcctacgctcagcatccagaaagatgcttattttaaaactgatgctcaacacatacctagaacagtggctggcaccccgtagacacaacaaaaatgttgaatgaatgacaggaagagagagcaaatttgcactgttagattcatgctgttcaataaagttaacccaaggcaaaattataaaaatacaaggaatcaccaaaaaattggaagatgggatttgggctctcatgttgcttgtagtctagacggcggggtggggaacagataattcaataaggtattacgatacatgtggtagatgctgtcataggggaaacttgagtgctaagggagtaaataggaagcaaacttacatcggatgtgctacaagagagaaggcgttttggagcatagccaagagaaggttgggaggaggagcagatagcaatccttgccaggggccagggacaaatggtgttaatttcagtatttttctactcttctttttaaacaagcttcccttgtttaattgctcactaagcacactttaaataaagctcaaccttttggtatcaccacctaggttaattcacactaatgagttggtaacaacattgtttcaaattaaaaccattagcaggagatgcccatgcttaacccaaagaatcttaaagatgattatgagttcgatgccttactctacaagtttctacaaatgagaaaattgaagcccagagacatcaatgactcaccaggtatcacaaagcaaattcagctcaaagctgggtcttcagattcccaacactgcwytccctccaggaagtaacatctcttacttagggagagagacatcctgggaagacagcatgagggtgatatttccaaagttagacaggcaggctttcttgatgcttcttaaaattcaatagcctcacggcacacctacttcagctggttactstaagattaacgagctatcagctatggcagcacctggtaaattataaactggaaagcagttggtaaactgtaaggtacctggtaaactgtaaaccgtaaagtccagtaaaatactggtggatttcagaggacattgtcctctgaccctgacaatcccaccttaaaatcttgagatatttcttagcatgaaaagtcccagactgaatcctgcagaagtttagagcaactagtaccctcagtaccaatttggaagcagtaattatagaaattcaattcaggctgttttctgacagtttgctaaacctccctggtataaaaatttaagagctgataaacagtttactattttgctgccagttcagtcctgagacgccttaggaaaatatttcatccccactgcttccagttgccaaaaaacaaaatggcttctctgacagaatcagataggtagtaggtctcctaggcattagaacatccttaatgagggtgagcattgggaaatgttttcaataattagaacatttaccgcaggattctagagtctccacagggttcaggagaggattcttctccaacaagccttccttcagtatgcattaackgatctcctattgagaggtgacagcatgctggcagccctcgcagcccttgctcgctctcagcgcctcctcggcctcgscgtccgctctgggcatgctcgagaagcccytcagcccgacactgcgctctgggggcccctctctgggctggccaatgcgggagccagctccctctgcttgtggggaggtgtggagggagtggcgcgggcgggaacctgggctgcgcgcggcgctcgcgggccagcgcgagttccgggtgggcgtgggccccgcgggccccgcactsggagccgccggccggccmgggcagtgaggggcttagcacccgggctagcagctgcggagggtgcgccgggttccccagcagtgccggcactgcgctcgaattctcgccaggcctcagctgcctccccgcggcgcagggctggggaactgcagcccgccatgcccgagcctcctcccaacccccgcggtgggctcctgcgacgccagagcctccccgacgagcgccgccccctgctccgcggcgcccggttccgtccaccgcccaagggctgaggattgccggcgcagggcgcgcgagactggcgggcagctccgcctgctgccagtgcaggatccactaggtgaagccagctgggctccttagtctagtggggacttggcgaacctttatgtctagctaagggattgtaaatacaccaatcagcactttgtgtctaactcaaggtttgtaaaacacaccagtcagcactctgtatcttggtaatctggtggggacttggagaacctttatgtctagctaaaggattgtaaacacaccaatcagcaccgtgagtctagatcaaggtttgtaaacgcaccaatcagtgctctgtgtctagctaatctagtagggacttagagaacttttgtgtgtagcccagggattgtaaacgcaccaatcagcaccctgtcaaaacggaccaatcagctctctgcaaaatggaccaatcagcaggatgagggtggggccagataagggaataaaagcaggctgccagagccagcagtggctaccggctctgctctctttcaattgtgtggaagttttgttcttttgtcctttacaataaatcttgctgctgctcactctttgggtttgcattgcctttatgagctgtaacactcactgcaaaggtctgcagcttcactcctgaggccagcaagactacgaacccatcagaaggaagaaactctgaacgtgtccgaacrtcagaaggaacaaactctggacgcaccgtcttcaagaactgtaacactcactgtgagggtccgtggcttcattcttagtcagtgagaccaagaacccaccaaattctggacacactattgcatagaattcatcctcgccaaaggcatatgtgaaacatttaagcaacgtaatgatgtctctgaagtcctgtgccgatagtttccaatgatatgtacagttgccatcagagatgcactatcacaaacctttgtggcaggaggttttgggggattaagttatcagttagggtgctttcaggtgcaagaaactgaataccccaataaaagtgcctcaaacaattggattttattattgttattgtctcacagaacaagactagccataggtaggcagttgcagggtggggtcagaagctcattgatgtcattgaagacactgcttttcatctttctgtcctgtcatcttcaaagtgccgctatatttcccacctaggtcacagggtggctgcagcataggcaagctttacaattgcatgtgaaaatacctggaagaaagaaaaaaagagatagggaggaagacaccttattttctctcttcatgtaaggggaaaaaattgtttctcagaaaccccccagtaaacttccctttatgttttatcagacacaactggattcaaaagccatcttgaactgcaagagggactgggaaaagtgaagctatcatctctgtccctatcttggaattgggcacttccaacaggcaagaaggatgagcaaaacacttgttgggttggctgttgtaaaaataagccactattttcatgcttctaaacactttatgtgtattagtccactagatcctcataacaaactcttggggtaagtatgattcataatcatttacagataagyaaactgaactgcagaagtgttaacatagtgaggaagtgaaggagccaagattccaactccaccatccggccgcagaggctgcacaaggcgcggttctcagccagcagcgtctgccacagcaggctgcctctaaaatcataacacgtaaaagttctaagtgatgtttgtctgyctcagaagtgcaaatgtgacatttgcccctggctgcagtcatggtgtgggtgaaaagagcagagggkcatccaagagtgacaagaattgctttctgtcatcatcaaggctgcgtcagctcacgctgtggtcaggtaaggtttgagaccaggagagtctacttcattgccaggggccagggacaaatggtcagctgtccatcatgctgtaacgggaatcagaaagtcttggcaagtcaggagcaagtgattgaagggtccagttacaagccggcaggattagaataaaatagaggctctaagttagaggaatgttttagggggcatttccactatctctctcattttcaaatgaaaaaaaaatgaggctaaatagggtggagtaatttatccaagatcactcaactagtttagacaggatgtgagggctttttttcaggtggacaccaagtaataacttggaggcatgtcttcaatgagaccttcattgtctgactcctgcaaaaagcatccctcctagcaattcatacattcttctattataatattgaatttactcactagttccaggtctctctcattagtttgggaggggcccaatagccagaccactccaaacatcagatgtgaatcttgacatctctacgtgctagctgagtggatcgtcataaattacatcatctctccagtactcactctcttcttctgtaaaatgggaagtgcgatagttccaacctcacagttttgttgggacaattacgttgtaaacatacatagcgctgcatgccaggcagattcaggggttggcaagtagcagcgactattcrctttttatcttcctgctgcctattcccatgtttgctaagtcaatttttgaatcaacagagggaactctgagacaacatcctaacagcgagcaggtggcagagggtcaccaagacataaagatgtgaggaagagaagggcgcagggaaagtatcagtccaaaaaggtagtaagatcatatgaaactaaagatatggaataaacacatgacgtagaagttcattcgccattaactcattctcccaaacctgatttgagttacttaagatttaaataagacaggtcccattttcactggcttccttagagagacctaaagaatttaaagcaatttgctttaggtcatatagttggtaagtggcagagccaggactaaacaccaagttcaaatagctccaaaaacaggtcctatacacctacaagtcactgtgaggattaaataagctgatacatgcacagttcttggcacaatggctggtacgggagtggtggctgattcctttgttagtttcatcattattacttttcaacagatccctcttgtactggtcccagaagagaaagactatgacattattgctcctcaggaagaggtgaagccctctcacccccaatatgcatcaatgtcagaatcaggaagcagatgagaggtacacagccccctgagaagcagtgcttgacacaggctactgtaataggtgtccacccatctgaatcctactgcccagcactcagctcagatggaacaagaggctgccagacgagaggtaggcaaggtggcacagactcaactgtcaccctaactgtatttctcaccctaccataaccttcgttaytgacatggtcaaaaaggaaacagaggctgcgrcaatggcagcagcagcaacagtgaaagcaaccaagagagaaggcagctggcactggagggcatcgtgccaggttccaggcacagagggattctggcagtgattacagcggtaaatagagctgatggttgtgccgggaccctaggccctgccaggaagggagcaggggagatgagattcttataattacactcgtttagactcagccatcatggggttacccacagargactctgatctgtccccaggctgggagttgcagaagcacctgttacagcagaagtcatttggcaagccaaacaaaatgcggattcatccaggccacctgtaaaggaatttaatgcctaacaacctatgcaaagcttctaattgtcataattaatttggcatctattcactggtaggtgctaaacaagtaccatatggtgaaagcccatttcctgctaacgtggtttaatcccccacataattaaagctgtgagaaattgtgtcatttgaaaaacccaagcacaatattttcctcacaaaactgtttttagtgtctcttcttttggccctctctctcccactattgttatgaacatcttactttcttcattttatccagctactgcttccccgatgcataatttaggttataattattttctcattttcccctccagctggcaccagtttgatcgctcccatttcatagatctttacaatgtyasactgttgctccagcttatttagaaatcctggaaagaggggaagtggagattgcagggcagcctcagccctcagaaaagtttctctgctttctcatgtgtcccagctgacaggatgccaggccagcaagctaatgaccaacagctgagcgccatggcaaagaacgatataaagacaatcatctggcttctgctactttacaaacaaaaggcaagagatagcatactggagagaaaacaaaataaaaacttttmataatgatagtgtcccatgtatcaatctcccattgtatttccacattgcacagttaatatcagaggccacctccactgactcagacttccataaacaagacactttggacacaaaggagtttctcgttctgtttctgtatctgtcgcctctaaaaaatacagtgatccmaagttcatcactaaaagatgtggggaaaaagtggtgatcaaaactttgcaatacaataatggacctttttaaatctaaaaatgtgaaaawcaatgcatcaattttcatactttctcttttaaattttctttcttttgatccccaatatattatcagtataatcaaatgacattagtattaaccaacatcagcagtctgtattctgtaaggaattgagctcatacaatgaatcacctcgagtattttttaaacacaaaattacaacaatttataaatgttaatctttaaaatgcacttgagaatgattgtcccaaaggttaagtggaagctttttcaaaaaacagatcacaargaactatgccaaccctttcctaaaaatttctataaaattcaaaggaagaaataaacaggaaatctagtttacaaatgaaatttaatatagtagtcgtatatttataggccaagagctcatacgtaaaatgtgtgaaggaacacaatggtcagatattgagatgctggcaactgctcatctgccaatgctgaatttggtaattcctcatttatacagagggaaattaagtaccaaagggctagaataatttacttattgtggacaaaaaagttaaggacaaactaaacttagtccagataattctcagatcctcacacacataaaacaacttgcatttattttatttttattatttatttattttttcgaggccaagtccccctctgtcacccaggctggagtgcaggggcatgatctyggctcactgcaacctccatctcccaggttcaagtgattcttatgcctcagcctcctgagtagctggtactataggcgagcaccaccacgcctggctaatttttgtatttttagtagagatggggttttgccatgttgaccaggctggtctcaaactcctgagctcaaacaatctgcccacctcagcctcccaaagtgctggaattacaagcgtgatccaccatgcttgtccttgtatttcttttaacaagagaaagactgtgtctcttctgttctcctttgtcttcaagaactgatttttatagtttattaaatattaaaattacatagcttgttataaattaatttgtattttgcagacaataaccattataaatatcacttagatctgcaactattttttattaactttactgtttgcattaaaaagacagcacttttcgggtacagttagatagtccaattcaacagtaagaaccattttaactcctaaaactgaacaactgtattagttatgaacactagatacaagtcatgaaactccagcttgaatttacttaggcaaaaagagattttatgagaaggatatcagaatatttcatgtacataaacaagagcaaggcctggagtcttatacagcttgaccccaggaacaaggaagcgaagcaccctccctccctccctccccttttgtgcttttagtggttccgtttcagtcacctccattagggtgtgggctttctcacatggtgaccaccagcagcttccaagcccctgatccacagcttctactggcagaaatagtcatctactcttttagtgcccattcaaaaatcctaaggacaaacccatctgcctgccttgagctgcatgactatatccaggaagatggaatacccttagtcacagaccacctaaagggcatggttagaatccaagtagaaacaattctccacaagaagcagggcaggctgctggacagacaaactgagaataatcaagtaaaacaaaacaagcacaaactctgaaagctcaggcaatgccagaaaggtcaggtgacacaaggttgaataccgaaagttggcattaaagcattctttgagtgagagagacagagagagatttatctatagttatattttacttctatgtcccagtaaaaataacaaataaataactttaaaacttggtaatacatcatttttctctcccctctcttagatgtttttctgtcaccttcccctgtcatttgttttgggtctataaattgcccctcaaaacttatgcaaagcataatgtgttcatcagaattgtttcagggttgtatgcgttagttttaggatccagagcttcgcgtgtgcttttttttttttttttttttttgagatggagtcttgctctgtcacccaggctggagtgcagtggcaggatttcggctcactgcaagctctgtctcctgggttcacgccattctcctgcctcagactcctgagtagcagggactacaggtgcctgccaccacgtctggctaattttttgtatttttagtagaggcagggtttcacagtgttagccaggatggtctcaatctcctgacgtcttgatccgcccgcctcrgcctcccaaagtgctgggattacaggcgtgagccaccgcgcccagcccttgcgtgtgcatttctttattccggattcgcagcatcatcttttgggctttgggagtctgatgtaatttccagttcatactcctttttcaattgctgcactttcatgtttaggtccagtaaagttctagccagctggtggttttggaaatgcatttccacctaaaagttagaaaaaaataaaaattttattagcctgagatgcagatcaaatgaaaccactctctgactacacagaagaaataagaagtttgtaggaaaagaaaataagatatcaaggaagatgtatttctcatcttattctccagttttaactgtttggtctggctataaaactgactttctatatgacaaggtaaaatccagatatataaatagtttttgaaatggcttgaaatgaaaacaaaagtagctgatgcacaaagctgtccatatgaaaaatacctatgcaccgaaggctgttttcaaggaatagcatgtgatccacaatgaaatcatttatctttatgcgccttctgagccacaggataactgcctacagccacctgagtattcagaatctgtgctatttacttgattacttatcatttcaagttttcaggattttaaatggtctacctgctgagcaaaaacatttaatgacaccttagagacacatgtatagttatgtgtacttatataatctaacatttttcactctggagtgaaatctgtttcatatcaaggctgatttataccatccttcaatgggagtttatgaaggtcctcgtgcgtttaaaaaaagatctctagggcatgttacccgggggcagtccaagaaagcttagtccaacataatctttgtattataactgaaaactaatgatcaactacttgcaaatttcttcagctagggcttgtttaatgcagttcacgaggaatttgttctctctgctaaaaaagcttcatcagcttgtcaatagaaaccaccccaggatgaaccaggacagtgtgttggtaaaaagcaaatattcatggtcatctgatttgcaaaataaagctactggataaaattatctttcagtttttctctgagacattcctctccattctgaagcacctagaatcatttttctgacagcaagaattagcaaagaataaagtaaatgaatatccagcaaacaagcactaacagtaaccacacaaccaccacaacaaaaaacccttgcaccttgcctgcaggaagcttcagctctctagggtggcccagatgctctataatcctgccctactttgagcttcctttcctggccctctttcccatgccagctcccattgcagctggtcagaaaccttgccagtccctaaataaatgctgagctgaagctcacctctttctgtccccatttctgtttaagatgccctttgccacctctctctgctgaacccagtcaaatgccagctcttctgagaagccctccctgattgcatgggcagacataattgcctctcatctgtgcatccacagcactctgtacaagtgcctcataacacgctgaccagacgagactgatgattttgagggtagaggctgtatattattcataattgtatccccaactaagagtgcactgcctgggcacacaacctagtaggttctctgtgtgtttgttataagagtgagtgaattaattaattaattaattaactgatgaatatccgtcctgtactttcatgcaagaatcaaggagaaaaattattggtaatgatttaccatctaagtaaaataagtatgtatwattcacacttacttaggaaattcaaacatcaatggttctttaacttttctttcatcaaggatccctctgagaatctgatgaaagttatgaaccctctctgaggaaaaactatatgcacatcaaaaattctgcatacaattttaggtatatagaacccctgagatgcactcacagaccctagaagtgaatgattcttactaagaaaacccagtcaaacaatagaaaatagtataaattgcaacacaactctaaattaattaaatttgttcatcgttccttacgaatatcatcctaatatatgatacatgtacacttgtataggaatatatgtcagttcctgtaaaaatccagttaatagccgaaaattgaaaactaagtcttctagtggtaatgatattaaggtacagtatccacactcctttgcctcttctttatgaccaggataaaatgattgaccaagatgttgaccatcgtctgtaacccaaggacacattatttgtgtatgtgtaaacttctctggttcctttccagaaaaactcctgatttttttataggaatgtatcagttcttttttggtacagtcagagtccaaggtctatagtaatcattataataataagagccactaaacaatacccatggtctaagcatttcatggaatattatctcacataagctctggaatcctatgagattataaattccattttacagatgggtaaacaaactcaaactggctaagtaacgatcccaaagttgtaaggccaacaagtgttagcagaacctgtaaatggtaatgttggtatttgagccctcatctgtttagattttattgccaccagcggtctacagccataccaccctgaacgcacccgatctcgtgagattttattgccacccccaacatattgcttgtctaaagctcctaacaagcaacttattaaaatgttatgattgaaagctgtctctgagcttattcagtgtaatctcctcatctgatttaaatatgagtcccctgaggctcaggaaggagtaccggcagatcccaagactacaatgcagagatggctgcgccaggtttcagccttccagtttagcatcctggcccatagcacaggcctccagtggccgaatgaggtggctccggctaccctgcagctcagactcactgcttagactcagggtgaaaaccaggtgtttctttgacattgttggataagatagtaaatctggtagtaaatctaatgtaacccatgttaacaatctgaatctgacacggaatttaggatattgtcctttttttgtttttgagacgttgtttcactcatgtctcccaggctggagtgcaatggcgcaatctcagcccactgcagcctctgcctcccaggttcaagcgattctcctgcatcagcctctggagtagttgggattacaggtgccagccaccatacctggctaatttttgtatttttagtagagacaggacttcaccattttggccaggctggtctcgaactcctggcctcaggtgatccacttgcctcggcctcccaaagagctaggattacaggcatgagccacagctccggcctaatactgttcttcttaaacttagaaatgcgataacattcttaaataagacaatttactaatggttggctcagttctaaagtagtggttaattgtattagtaatcagtgcaaaagagaagaattttccaagtcaagtctccactgcacactttcctaggcagcaccattttaaagtctgattgctcctattcattgtgtccttttcaagttgtgactaatttccagttttttgaattaaaaaaaatcagtcagctaaaatatttacctatacaccctcctgtttaatattcggatgtaacctgtgtaatgttcgaaatggtgcaattttacaaaataccttatcacttccagttttctaaattattacccacgggaaagataagaataaaacttgcggggcataaagaaagagttactgatggacacactccatcaatcgcaagagagagtttatttcatggaaatttcctcctccgcgagccatacatacacatagtcacagttccctacagggcagaaaactatagaaacgggttggggaggagacatcttgggtatgtcactggtagaccaggcacccccgcccccaccccccaccatgggtcctgcagggcccttttccttcccaacgatgctggggaggcgggggcgtcaacgccgtgtccagacctgaggggccccccaaggcgtcgggtgggctacgcggccagcggctctgcagctggaggagaggacccgggagagggagccctgggagccgtccgcctagcccgctctctcaccagctccgcccgcagcctggccagggtggcctcaacgcccgtccagctctgctcctcccgcgccgccgccgccgccgccgcctcctgcacgcgcctcgagatcgcgcgctgcaccgcccactggaaggcgcgcgtcagccgtcgtctgaggtcctccagcagcgggctggcggcgagggcctcctcctggatgtccgtgctcctgccgtccccgaagaagtcgcacgcgggacgaggtgggaaccaaagctccgctctacctgggagtccctggagcccctgggaaattctctctctgcagcggcggaagtccccggggcccatcgcggagacgcctggtcactgctctaccgctgctgctgaaagatgagtttctaagtttgatgtttagggcggggtcagggcgggggcggaggtaattcaaggacccttgccaagtgggatgctgcaactgccccgccattcagagacgctcctttgctcccagtcccatcttagtcctccattagcgacagaggaaggaggcggttcccataactccaggagaagtttaagctgagtcgcttttttctgctgcttgcattgaaaggaagtctttctaaggagaaggcttggtaactgagcagtcagcctatgtaagtggaagttgaggtacaggtggaaggtttatgaccaaaggttagaatatttcaacccaaagccttcctggttgccttgatcgtctaatacgtcattccttaaaaacaattttttttcttcctactctgccaggcactttgccaagtttggggaatgcaaaggcttaattagacccctcacctttccccaggtattgcccgcagtcaagggggagagccttggccctgcttgctagttagaatgtaccttctacaggttcagtaaggcatacctggaagtctgagtctccatgctcctttctattttgactcctgtctgccatgtccacgtttatgaaggggttaaaatgaaaaatcaaaattccccttagcccaaagtgtgtgtgtttaattcccaactaataaggtttggytctgtgtcatcaccaaattccagtggaattgtaatccccagtgttggagatgargcctggtgggaggtgattggatcatggaggtagagttctcatgaatgggtttagccccattcccgcctggtactttatagtgaatgagttcttaccagatctggwtgtttaaagtgtrtggcacctcctctctctctctcactcctgctctgccatgtaagacacttgctctcgctttgccttccactatgagtaaaagctccctgaggcctccccagaagcagatgctgccatgctttctgtatagcatacagaaccatgagccaattaaacctcttttctttccaaattacccagtctccggtatttctttatagcagtgagaggacagactaatacaccaactccaggtaatcatgtgccaatattacctgtatatcctttatcaaagaacatattctgcctctttttgatctaatagggaatttctaaaaaggagtgaacaatcaaaacttttgtatgatcaaagaatgcaattacaaaaaaaaacaaaacatagtttagacacaactctcatcttattcatcattcattcattcattcattcaaaagttacaagtcacttgcaatgttccagggtccatggtaggcattgaaggcaataacaactgatttttattcatgcttagtatgtgccaggcaatttttatgtattaatcttcacagcaaccttgtgaggtaagtactattagtttctgcattttacaattgaggaractaaggcaagagattaagacgtacaccaaagatctcaaagctggtaagggatccactggaaatttgcacctaggaagtctggcttgtgctccaaaccactgggatacaccctggatacgctttatctcccaaagaggaagagarttgctcagtttatatgttgcatgagtgagtgagtaagagtgaataagtgtttaaattcactatgttcataaaattcggctctattgaaatggcttaaggctcaactggataaggaacaatacaggttactcagcctgtgcagataatctactaaattgaacagcttgcaatagtttacaacccaagcacagtaaaattcctaccattgtatattgcttcataaagattccctagaaacatctgaagatgtgttgtcttggtagaaattataaaaatccatgtggtctgccatgcagcaatggagtgtgaatttagggttttttgtttgttggttggtgataggttgatggggcttgaaaaccaccactagtcaatgtacaatataaacgtttaaaatgaattttttgctatgatttttcacttccatttccagatcatttacttcaacaagaatttcagttaagttcaatttaactcaacagtgaatggcgcatgttcagtgttaagaattgtgccatatgagggagatacaaagatgaataaggcatagtttttgtcccccagaagcttaaaacctgaggaagcaaatttattgattcattcatttaacaatatttatttaatgtcttattatgtaccaagcattacacaaggtgctcaagctacaatggcaaaccaaggagacaaaatgtttttttaaaataaactggtttaccacaaattaataattttcctctataggttaatttttcagttgtggtacaccttgaattttacaattttttttctttctcttacacaggcaaagcaaattgaagaattggagcactgaatataacatcyacagacatttgaattagaaaatgtattaattatttattgctgcataacaaattactccaaaattcaatggtttaaaaaaataaacatttattttctctgacagcttctgtgggaaagaatttgggaacagcttaggttatggtccttagcttttatgctgttgtaaccaaatgtcaggcaaggtctccatcctctgaagctggatgtgattggcgctggaggatctgctggcaaggtgaatcacttagatgaatcactcaaatgccaggcaattggagccagcacttggtgggaggcctcagttcctctccatgtggactcttycctactattgtgtaagcgtcttcatgatatagtgggtagacttccctcaaaacaagaagagagaaatacagagagccagagagaagctctttacatgtgctctgaactacatttttatgacctggctttggaagtcagttattaccattctgctgatcagtatcaagtctctaagttggagctatattcaaggggaggaacctcagctccaccttttgaagtagggagtatcaaaaatttccaaatatatttttaaactaccatgggagaaacatatgtacattacacktaagtaaacaatgatacaaatgacttctgacttcctgcagaaaaaaaaaggagtccagaaaacattgagatatttttaaacgcagagagaactaaattaacacagaattctawgttcagcaaaaatrtcctcccaaaaaccaatctcaaaaagcatgtttttaaaaaaggaaaattaggaaaatttgtcacaagcaggcttacactataagaagtactaaaggaaattcctcagctgaagtaaaataatagtacagggaaacacagatcttcaggaagaaatgagtaacataagaaatggtaagtatctaggtatacgtaagtgactttgattcctcttaattaataaacatatggttttatatatatgtttttaaaaaacaaatatatatattgttatatacattttttaacttaatggttaggaaatacctatatcttgttcacaacaacacaaaacccatttagcacatactaggtgatcaattgcctagttaattaaactgaacaaaatatttgattccctctatttccctgatcttcatctctggcatttgtttcactgcagtaatccagtcacatgagccacacctgaaagtatgctatcacccagaatgatatctttaaaagcctgaattctgaaaatctattctcagtccacatccttttttctatccacaattcactctgacccctcaattcaagagaaatgactttctgaagtactcttctgtttctcttttcccacccagaatcttgtggtaaattatttcagctaactcatatcagcaccttctagtgctctatccacttggccttctgccaaccctacccagttaatttcaatcctatttattcaatgtctttactcctgtktttaagcagtcaatgtgatgcccgacttcagatgtcctctcaacattacacaaccatcccttgattcatacctccctgaccacctcaaatctctcacaaagaccatgtggactctgaccaccacctaccctctcattgtgtctccattcccattatactgcacagaaaccattttttacttcactgaggtgagaattgacaactgttaactcacatagcacttagtatatgccagctactatttccatttgctttacattcccttctcacaccaaccctatgaggtaaatgccaaaactaacaacattttacagatggaaaaactaaggcacaaagacattaagtaattccttgaaggtcgcaacccttagaaagtcatggagtgagaagttagccccattctgtgctgtctgctcctggtaccttgccttttcataaagatgatcaggtggagacaccctcagtttatatttcttttacctccaaacatcaacatcttaacctattattctgttttcaccaccaagatcaaagggggaacaagagagaacacttagaagagagcaggatgcttcctcctttgagccaagaacagatgaaaaatgggtgaagttataaataatgaaaaggcgtaacatatagaagataattaataaatcaaccaaagtaaaaaacgggctacagaaaaatatgaaacaaatataatgaaaagaaactcattcgtgtatattcattgcagcactatttgttatagtgaaaactgtaaacaaccaaaatatataccaatacatgtggtaagattgcttgatacccagtcaatctccattctccccttcctccttactaaaagaacctgattgttggtggtatcaatatatctgactaaagtattaaatttcccttaattcctgayagaaagggatggctatgtgttaagatatgaccaatgagatataagcaggaattgttaggtaggacttgtacaaaagtgttttaaaggtggactgactttactggaacaccartgtgttccttacctttcacttcttcctgactggaatgaagatttgattgctagagctccaacagtcactttgggaccataatattaccttgaggatgggagctacactcagtattagaacaccraaatcagtctatctctgaaaacgccacagaattatcacatatgcccaggactatacaacttttgttacatgagaaagataaaacttttaattttttgccaaattttttagtctctgttactagtgccaaaactaattcctaacacaatgagaagaaatatttaataaattatggtatacccataatttagaattccataggctcaatctttaaaaaggtggatccatgtactagcatgggaaaatgtccataacataccgtcaagagaaaaaagtaaccaggcatggttgcacatgcctgtagccccagctactagggaggctgaggctggaggatcacttgagcctcgaaatttgaggctgtagtatactatgatcatgcttgtgactagccccctgcactccaacctgggcaacatagtgagacccccatctctttaaaaaaataagagagaacagtaaactgtgaaataatatgtaacatatggtagaattttttacacactatagataaatgtgtttgcatgtgtatttaaaagggtttagaaaaatgagtgcaaacttgttagcagtggttatctttgggagctgggcagcaatgaatgtaggagtcttttattctttaatatgtgtatctctttattatttcaatgtttaacaacaaatacatgctgcattacttgcgttataaaaataatgggtgtgaagaaaaagagaagtcrgtagaacccattctaccctaactacttgggatttctttggacagggttctgctycattggcacatggggcaacttgtaaagaatgctatgcagttgggaggctgaggcgggtggatcacaaggtcaggagattgagaccatcctggctagcacggtgaaaccccatctctactaaaaatacaaaaaaattagccagscatggtggtgggcgcctgtagtcccagctactcgggaggctgaggcaggagaatggcgtaaagctggtaggcagagcctgcagtgagccgagatcacgccactgcagtccagcctgggcgacagaaccagactccgtctcaaaaaaaaaaaaaaaaaaaaaaaatgctatgcaggccgggcgtggtggctcatgcctgtaatcccagcactttgggggaccaaggcaggtggatcacctgaggtcaggagttccagacctgcctgaccaacatggtgaaaccccgcctctactaaaaatacaaaattagccaggtgtggtggtgcatgtctgtaatcccagctacttgggaggctgaggacggagaatcgcttgaacctggcacgtggaggttgcagtgagctgagatcatggcattgcacttcaactcaggcaacaagagtgaaactccatcaaaaaaaaagagggaatgctatgcagtcgtctaaacatatcaggcagtgaattaaaatacaatctgaaagttcagattcatttgttttcactttctattgattttcatttctctttgggctttagttttaggtattacatacataggtaaaatataaatatttatgccattcattaacctgcattttttttcttgtgtcttgactggrtcccaaatttacatcttttaaataggtatgatccagaaacctggcagctatgtgctgcaagactgcctttctgttgaatcactcctctttggcatagacaccaatgtgaacaatagaagagattcacctgacttggaaatctcagccaaaatgctgtgggcttggtagaaaatatacctaaatgcatcccttgtgaattattggtaaatgcaggaagccatttgaaaccttcagttacataataccaatcacataatggttccattgtttcaccaaaacaacagactctcaaatatttatatgagttgattttttaggaaataccaactatatctgcaccatatatctgcaaatatatctgtacaacaacattttcaaaatgttcctttaccatttatcaaaaagggttgaggaaccccaaaagataagattctctccttaaaactctgaatagaaatggaaacatacctcctatctttttgattgaactcttcatagaatccatctgattgagaagtgaaatcaaattatacagatcctaaacaagattttaaccataaagtgttatctcttctatcaacataacattaaaattaaattgaaattaaataaaattaacattaaatgttaaaaatgtaacattaagtttctagtaagaaaaaacaaggtgatatttaaccacaacttacccactaatgctcaaatatcaacaaaactaagtggggttattgggarcacataggctttctccactggattgaaaaagactattacttctgtcaggagaccacttctacctgacctgtatcaagttgatcaaaaaagaatcagaatttctagaaggattttattactcattattttatctcctttctattgaatagaaaaatgaaggtcattgcttcttgcatcttatttacacaccaatattactttttatgagatccttctataactctataaagaagaattaacagtcataacaacattaacaacctccagtagacacagaatagaaaaacatttgaaaaattatgatgcataaaagagaggaaaagagccagatattttaaatgatcatgaagatgagaagaaacagttggtacttcaacttaatggtttgttgttttagggaaaacactagggttatcatgtggagacttagtttctgtgtaatattgaaacagcctaacatctaaaatcatgtgcaccaattcacactgcttttgatgtacctagaattaaggaacattcattcattcaatattcattcattcaagaagaattttgggaagccaggtgcagtggctgcacctgtagtcccagctactcaggaggctgagacaggagaattgcttgagctcaggagtttgaggcagtagtgcacaatgatcacacctgtgaatagccactgcattccaacctggacaacctagtaagaccccatctttttaaaaaaawaagtattttggagtacctatcatctgccaggcactatgctaaatactggtatgaacactgtttttattactgttgccttttttacattaatttgattgtcctttcttagtttatttcatttcaccctttcaaattcacattcagtgaaaaacaaatgagtttcccagtcttgaaaagtactaatattgaaaattagcatacatgactgaaaccattccattaataagacaatagcaatactatctctcttgctttaaatcaatttaatgattagatgctaaaattttcacagggacgtagcttgttggttgagtgatgactctctttgactacaggaatactcacatttcttagcacaggttcagtgcttaagcgtgaactacaagatgaagagagtacctgcagtgaattgtacttgttagttacttcagttttagtttagtgtaaaacaatatagacacctgtttttcaaaaaactttttttaattacagaaaaatcctagatgaawataacaaattgtaggggcacagggatcccgttcaccttctgaaggttccctgaaaataaagtgacaaaaraccgattaataggagaaaagcatacaaatttattaatgtacagggggaaaaaaatcacagagtgattatcaagtaacccaatgcagtacagaagcttatatacactttttcataggtcaagagaaagatggggaatatagaccattgttttgagggatggtaagtcattaggaatgaatggactccaaaagtggaaggcagagacattaagggaaggtgagacgtggtgctgtatgggcacaaagtttgtcttattaggcaaataaagtaccccaagtaatttcttagggctgtcctcagaagaacagatgaaaagtctctctcaacgtggtgctgactcccagtctcttctcttctctgatggttgatctttcctagttatctaatgagatccctacagagggggtttaagacaattgagggagggtgcagtagctcacgcctgtaatcccagcactttgggaggctgaggcaggaggattgcttgagcccagaagttcaagaccaacctgggcaacatagcaagaccctatctgtacaaaaaattctttttaaaaaattagccaggtatgctggtgcacacctatggtaccagctacttgggaggctgaggtgggagaattgcttgagcccaggaggtccaggctgcagtgagccacagctgcaccaccgcactcaattctatgtgacagagtgacagggtgagaccctgtctaacaacaacaaaaaaggacaattgcatttattttggaaagaaactttcttggtcaattaaagaaattccagagtcccttcctgcacttaaaggaacaagacaagttggagtggggaacgagacaaggttagaaactcttgcctctgaagcagcatctaaggcctctcagcatgtcaaagcacaagtctttggagtattgctttctgagcctcaacaaaatcaaaattagaaagagaaaagtgactcctgagaagtgattctttgaaaggggaagagaataattaatatactggtagaaacattatgtctggaaattgcaaactcagtaactcagttactcagagctcttaactgtgtagaaggaattagaccagcaaagtgcaaggaaaagggtactagaaatctacaaatgtgggctccttacttattcagattttgactccgtgcgaaacgctctctctccgggcttctcttttttctcatttgttactgttaaatcaagtttagcctaaagctgtctccttacatattttaagtttggcctaagcgtgtctgtgtacatagtgaactgtaatttaactggatgtgtaaacagacagtaacctactcttatgccaatcactgagtttcagctaatcaaaggcggccaactattcaaaccgtgttcaaataaggcaaatgctcagctgtaaccaatctggttgtttctgtacctcacttctgttttctgtacatcatttttctttttatgtccagaaatcttctttgaccatgtagctgcaccagagcctccctgaacctgttctgggcagggactgccccattcatgaattattctttgctcaattaaactctattaattttaatttgtctaaggtttatcattacttttctacaaactacatttgctgtgctcagaaaatttctcaggcaatttcacttctccgtgtctttgcacgtgtgctgttccttcacgtggaatgcccttcctgccttacccagctcttctaatgagtcttccccagattcccaaggcaagaaaagactctctctcctttgtgtgttcctaccactgcatccacaactctagttcctgatttttatgctacattctagtccccattattccttttaatctgtgagtttgtgacacacacaccttctctttttttggtctgatctgttccatttttgctggatattaagctacactccagctctataagattcaatggatttcaagtacctcatagagaaaattatgcatttataagtccaggaatacacaacttctttttaaccatagcatcagatgatgctagctcacttttgcaagcattagtgagcaaagtacagaaaacagtaggagaccctcacttgctgctttccagtacctgggagccccctgctgtccagaaaaacaaaagacactgcagcctctccccaggctaataaggcagcgctggacacttaacatgcaatctttaaaacttaccatttcatacaccagagcatcaatatcagctgttcttactatcctccttctgaatcaaccacgtcctctttctgggtttttaacttttcttaatggtaccgccatgatccaaatcaccctggatcaacacccccacccccattcttcccgcccctactcattttttcagcagtgttgctattgtttcttgaacttgggctatgtgccaggctctgagctaagctcttcacatgcattacatatcatttaatctctcaatagccctataagtcaggctatgctgctcatttcagtgagaggacggctgaggtttcggatggttaattaacttgcctgaggttatatatatggcagggaccaaagctgggacttgaatcaagaattcagctgcagaagccttaaccacttgcttccttcccacacactgttttttcaagcccagcccatgtcctccttgcgaggccagctcctactgcaattcagcttctcattgtatcacacctgaactacaatcagagtcatagctacactcctcaccttctgcctctctcattcaactaaaatctgatatttcaccattaaggttttattaattttgttaactgggtacctaatattggagctccctactctttctgaactcgcagactttgacctttaaaaccctaaggccatgtttcaagccaacagcattgtctgatctcatctctccttcacccctatgttgtggtgagtccatgagtctcactcagcctgctctgctacccttgtcaaacactgacaacgccactccagccctggtattcttcattcactctaactctcttagcactggcataataggtaagagttggttttggaagcaggcagatttaaatccctacagagttacttttcagttttgtaatgttgaataacacttatcacctagcctaattggatactggatatttgaaagcctccccccgaaccaaagtcattgtacagataatgaatgtgaggttttaaaaattacagagtaccatactcttaactctctcttccacaaaaacctcaaaataataatacctataatttttgactacctaacttgcaccagcaatgcgctattttgtgaagcctaagatataagcataaacaataactgttagataaactttgtaagagcaaatgcaaatgacgttaataactgatttttttaattattgcagtattttaccagcaaaatgcagcagtaaatgtgtgctggttgaatatagatgaacaattgtgcactttactatgtaaagtagataatttcaaacaaatgaatggtataacatttgaataacatttttatttttatttgtatagaagatatattccaatatacttgaatatgctgagctaattctctttccacactccccaaattatcttccctccccrccacatacataatagcttgaaatttctcatatctggccagaaaagggtagggggtaggcaagaaaaaaaggtaacgcatggtgggcaaagatggtctgagcctcctagattatagacgttgcataactttcctggctgcaaagtgtttgtttcagaggcagaacccagccagagaaaacttcactgactccaagtttgctcagacatagtgaaatggctagtactgactagttcctccactctggctgtctattttttatttattttttatttttttattttattttatttacttttttttttcttttttttttttgagatagagtctcgctctgtcacccaggccggagtgcagtggtacgatctcggctcactgcaacctccacctcccgggttcacrccattctcctgcctcagcctcccgagcagctgggactacaggcgcccgccaccacacccggctaattttttgtatttttagtagagatggggtttcaccgtgttaaccaggatggtctcgctctcctgacctcatgatctgcctgcctcggcctcctgaagtgctgggattgcagctgtgagccaccacgcccagcctctggttatctattttaaagagccctcggataaaattgtatacctgacttttgctttcttatagacttacttactccaaagaaagagatattaaatacagagagaattgggcaaggacccaatatacttgtgaaacctcagtgtgctagacaggtgtttattttgagaaatatcttcctggcaagtatgttgtgggaatgaagactggaaagtagaactgaatgtttcataattcgaaacctgactttgaagcctagagtcaaataccgtatagtaattaatttatctaaaaaacacacaaaatgatgtaaactttagtagtgatactgaggtgggaaattaaagaaaaataaaattaaaaagaaagaaaaataagctttcctgtattaggctgacttgtcccagagatagcaacaggcacagcccagacccaggaaaagtcctgataatattatctaatgcgctctggagactctcccagcactccctcaacacagggagaagaaaaaacaaattttcctttgttttrtggaatgagtttatagattcttgttctctgtaactagtaacttcaagtattctgttttatctaagaagtacaatgaaggtcatcagaagcctgagcaggcctgaactaycgctgcctgggcaccatagtaaasgttatgagatgaaccagtgcaaggctctttagagcaaaacctagataatggacatctgggttgcttggcaatggtcatgtgtaatcctgagttataaacctgtcacaatttaattaattgttctgcctctgtatccttgctttcacgtgaccgtaaccrtaagcctgcttcaaactagcccacctcttttgtgaagtgtgtataaaagtcaagtgctgtctttgttctgggcccagtctttggacattgagtctgctaggtctgagtgcattcaataataaatgtatcctcctgtttacaccccaaggtctctctctggtcctcaggatcccgcaacaatacctaagcatcaataaaacaccrtctacttccccacagaggcagcttgcaaagtgtgatgagttttcacaaatgacactgtgataaatctctttgtggcttgcggggctctcagaagatacaaggggaaagggcaacaaagcagactgaatgagggtcaggaactcagaggaattgccaagaaaagtcatgaccaggatgggcgtggtggctcatgcctgtaatcacagcactttgggaggccgaggtgggcagatcacctgaggtcaggagttcgagaccagcctggccaacatggcgaaaccccatctctattaaaaatacaaaaattgggctgggcacggtggctcacgcctgtaatcccagcactttgggaggccgaggtgggtggatcacgaggtcaagagatcaagaccatcctggccaacacagtgaaaccccgtctctactaaaaatacaaaaaatagctgggcatggtggtgcgtgcctgtagtctcagttactcaggaggctgaggcaggaaaatcgcttgaacccgggaggcagaggttgcggtgagccgagatcatgccactgcactccagcccggagacagagtaagactccgtctcaaaaaataaataaataaataagtaagtaagtaaataaataaataaataggccgggtgcagttgctcatgcccataatcccagcactttgggaggccaaggcgggtggatcacttgaggtcaggagttcaagaccagtctggccaacatggtgaaaccccatctctactaaaaatataaaaattggctgggaatggtggcacatgcctgtkgtcccagctattcaggaggctgaggcagaagaatcacttgaacctgggaggcagatgttgcagtgagccgagatcgtgccactgcactccagcctgggcaacagagtgagactccatctcaaaaaaaaaaaaaaaaatacaaaaattagctgggcgtggtggtggacaactgtaatcccagctactagggaggctgaggcaggagaatcrcttgaacccgggagacagaggttgcagtaagccaagattgcgccactgtactccagcctgggcaacagagcaagactctgtctcaaaaaaaaaaaaaaaggaaagaaaagtcatgaccagaagagtaagcagaggttgaccatgattattaggactcctttttctggccacaccaggaaaatcacgtattaaataagcagtatacagaaaatgccttagctaatgaatcataaaccaatttagtttgcccctttgaataaccttcaagcaagcaagaagcaacataaaaataattcccggtgtgagaaagggcttactttcctcaatgtcagtatcacgtcctaatcacggaccagtgaagggaacctccagaatctccaagaagctttatttagcctcaaggaataggaacactgttttaacttgctatgcctgttaacatagttcaccaaggaggggaacgttagctgatatattttcgaatgatcttcagcaggatttttgagagttttctagtgagttctaagttaatttwaaaaaattatttcaagaaatttggactctttctagagaaataagggaacaaattttcaataaatgctttatttatctagaaagagtttgtcaagattgtakttcagtgatttaagttgaagtaccaaatatacacctgagctggaataatgggaaagattctctattacaggtttcagtaattgaataactgggaagaaaatgttaccaaaaaagaagttggggcataggaaaagaggctaagaatataagtatttcattaaaacaaccagatagcattcattaactatattttgttatctgaaagaaagcaaaaggcaagcactcaatacatacattttattctctaaaagaaaggtttatgatttaataatgtctttttttcttttttgagatggagtctcactctgtcacccaggctggagtgcaggattacaggtgcctgccaccactcccatctaattttcgtatttttagtagagagggggwtttatcatgttggccaggctggtcttgaactcctgacctcaagtgatcctcccacctcggcctcccaaagtgttgggattacaggtgtgagccactgtgccyggcccaataatgtcatttgttaagttttctgattaaaaataatagatgcttattgttgaaatcttggaaaatacagagataaataattacacccaatttcactacccagacatgactgcggttaatattataaaattatcattcagctgcttaacctgtctgagattctgtttccttatttatcaaatggggttaattaccaacctctgagggttattatggaaattaaacagataacacatgtgaaaggttagtgtgcagtacagagtaagcacacaaaaaaggctagctgtctttgtatttcaatgcatgtatccatttttattttataaatcaaggtctaacttatctgttgttttgtcctgattcttccattaaatatacyatgaacatttgcstagataagtaaatatttttttaacatactcttaatagctacatgggttgtagtccattttataggtctcaactaggtgcaattttgcccccaggggacatttgacgatgtctaaagacattttgtattggcactactgagaaaagggagctactactggcatgtacttgggagacaccaagggttctaaacttcttgcaatgcacaggacaatctctcccaagacaaagaattctccagcccaaaatatcaaaaatagtgaagttgagaaactcaagaatgtatgaagatattttctaaatcaagccagtcgtcttagacatttcaataaattttgttattattataagtaacactggaaagataattctggtagttactgtttgctgagactattctgtagtctgtgtgataatttactttaaattgcttcaatrtaaacattttggggggtgatgttgtgtgtgtgtgtgtgtgtgtgtgtgcctacacgcatrtgagcttgcccttgatagcataatgcacattatccctaatccacatcctctggacaattaattagcactgaaatatcctaagaagaatcaacattttaagagtagattacttggtacttaaactattcttattggtatctacaccaaaggttgtgttaattagtctaagtggcattaacaataattttctttgatgtaatcagtgatgtttgttataggtgagtcataaggagtaagttgtaagacagtgctcttggatgctggaggtgcagkaataggtcaagcccaggaattcaatgccatcagtaaagtatctgaagtccctgacagatcctgaaacatgttttactctacacaactttactaacacaacactggtcctgccttcaggccattgttgtgttagcctttgaagcaaagtgctggttcctggatataaaagagacagcctctctgagaggctcgtaggtagaatattttcaaattggttttttgggaaatataagaaatatacctaaaacgttaaaaccatgatttccctgatattgttgttcaactactttgaaacagacacaaagacacacacacacataagtgaaacccaaaagactgctatttagaaaaagctggatatagggtcttggcatcacacagaatgtggtttgatctataatcttcatagatctgtgacttggaacaacttcctgttctgagcctcagttttcttcataaagtgaagatcgcagtgttaccaacttgagcgtagttgtgatgattaactgagacattaagatgtattagaatgctggcacattgtaagcatgctgtaaatgttagtgttatttgcatatctttctatccaattctacttcattccttaggacaaatttatagaaatgtaatttatatgtatatgtacatataatgatatttcaatgtaggttcattgattgtaaaaaattggacgggaatttttttaaactgaaccagttttcaggttcaaatggaaattgtaagtctgtggaaatatctagaaaaaatttaaacaagaaaagataagactatccttaccaaatattaaatgcacactgtatctcattttgttataaagagtttgaagccacatggatttatgcgttaccttgattaatctttaaagtcgtgctcctagtttgctttttcttttcaccctagaggcattgcaacatagcatgatttgaaatagatgaaagatatacctctttctcgtcctccctcctctcctctttctcctgtagtattattttgaacatggatatattatcctgcaaatcattttgaggatctagaaaccaaccaccagggcttttaagtacctcagttagaagactattgagttggatgaaagacaggctggtgtgccaagcaaagttgtttccaatatatcccatagatgagagttttttgacccccacccacactattgacattttggaaaacttggggaaatcctttgttgttgggggtctgtcttatgcagcacaatgaagaatgtttagcagtatccctggccattaaacactagatgccagtagcaagactctccactaaccctgcctcccccagtcccaccctccagttgggacaaccaaaatgcccccagatattgtccaatttctcctgggggataaaatcgcccctggctgagcaccactgaactagacaaaagggaagtcatggaaaggtttgacggaaagagacacaatcaaaatctcaatattatttttattrattgcatttagaagcaatttcaatgttaatgtgagggaaagtgtgtaatagtttttacaaaactggtgaaaaaagataaatcttggaataaacagtccagaaatagattaatgctattgaaaatgtggtgaaataggcatgctcacacaatataatggtatcataatataatggtgtaaatcagtacaattcttggaaaggtaattgtctatatgtatcaatttaatgtgtgtcaaattaataaaatattcatacttctgggaacacatatacttgtcagaatattgtgaagttgttaagaattatctttatgaagagtatgtaataatatgcaaacacacctatgtcacattaagtgagtaaatacccagaatacaaaaaatgtatattcaatatgaacacaattatgttaaaaaaataataaaagttcaggagggtgtggaacaacatttaaattgcttttctctgagtgctaaacattgcataggttacttttctgctttctgtttcttttattttaacattttttctataataagcatgtgtcaactaagaggaaattttgtaaaaaaaaaaaawcgaaattttacaaattgaatggaaaaatttgaaacagcaattaaycagtgttttgtgttttttttttttttttggtttttttttttttgccttcattgactgttcctcttgttgacaattcactgccttagttttcctagagagacatttgttttctgttgggaaaatcccccacttactggttacttatccaggaaatattaaaaattgaagtaacatataacaaacgtttaaactgacctgattttgagtcagtgctttggggctgctggtgatatattttaattttrgtcttaatttgtcttcttttccctcacatgggtgacattccattctaggaggaactttgtactggttctacttatcggtcattgtcattcctgacagtattcgtcgtgaaatggagacatattagctgcagctcagggcaagaaagaatctgaattgagatttgttcatttgaagtaaagtctagttatagttatgacttcaaatrtttctttataaggaactcaactctactcatctaccttgccttagatttagaatgcaattcttcttttttatttgatgttcacatttttcttcagcccatgtaatttattttatggctggcatcttggttagattaatttttatcatttactctcagatatgttaacacttcacataattttattatttcctgccttgagttagcatgatgtatgcttaatgaaatatcctacctaagctaaaggatattcatagagaattgtaataaaagtactagagacatgaaatatattgagttatttttagaaaatgaatcaagataaattttagtcatgaatagcattattttatatatacaccaaatccttaataatattgtctaattcctattactattaaacacatcactacgatgtctcttaattaatataataaattattgctattggactttgtaatctcaagaagttattagtgagacaaaatttgatgccatagtccagcaatcataaatatctattgagaagtgcttagtaactaaaataactaactggcaaaatatctttgcttttagcttttctatttaagtagaaatgttcccattctggtgagaattctaaaaatgttagataaagcctatttataatgttgtcattagaagaaagactcacaattaataagctttatgtatcaaatttgcagggagacactattctggtgaaagttgatttgacctacaaattgattctatggtataattaggcacatttttgctatctgttctcatggaccaaaagagtcatttattaatttgcaaaaagaaaatacaactgtcaagccraccagaatgcttatcagttaacatgtcaaaagtctaatagaaaaccaaactattatatctattttaaccccacatagcagcccttcaagtgagtgasgttttaagaggccaataagtaatactcttttcttccactcttgagcttgacattcactaagaaataaaattattgacaaaagctttattggaggatgaggcttggaaatgcagctacgatgatctttcttacactgctgcagcattaaattgccacaaggaaaagtgagcaactgagtcctcaggggctaaacatggccttggaaacttgaggtaytgatgagttttaattcactgaggttgctttgtgagatgggatagtattagacaagtatagtcatgcactgtataacaatgtttgggtcaatggcagaccacgtatgcaatggtggtcccataagattaaaatagagctgaaaaattcctatcatccagcaacatcttgatgatcctgactctgtgtaggcctaggctaatgcgtgtgtttgtttctttatttttgacaagaaagcttaaaaagctaaaaaataaaaataaaaaatttaaaaatagaaaaaagtgcctttagaataaggatataaagaaaatattttctatagctgtacaatatgcttgtgttttaagctaagtttaaaaaagattaaaagagtccaaaagtttaaaaagattaaaagtttatgaagtacaaaagttatagtaagctacagttaatttagtttycctagaatatgtatttttaggatatgtatgtttaggatatgtatttttagaatatgtatgttaaagaatatgtatttttctacatttagtgtagcctaagagtaagtgtttataaagtctacagtagtgtctagtaatgtcctaggctttcacattcactcactactcacacactgactcacctacagcrcgttccagtcctgccgctctatttatggtaagtgccctgtataggtccaccatgtttatttttatattaaacttttactttacctttyctatatttaaatatgtttagatgcacaaatatttaccattgtgttacaattgcctacaatattcagtacagtaacatgctgtaaaggtttgtagcccaggtgtgtagtaggctataccatctaggtttgtgtaagtgcactctgtgatgtaaacacaatggcaaaatcacccaagggcacatgtctcatcatatctctgttgttaagtgatgcatgactgtacatcaaaatcttagtagaacaaacctgactttgttcaaaaattttgtgtgctaggaaggacactggcttaaaggattttaatcattaagaaggcataacacattttaatatgtctgcacctaataagaaagttttatcactgggacagaataaagagtcaagaaatgaactgactaaaatacagtaaattaatttttggccaagggatctgatcaattcagtaggaaaaaaagaaagtttttttttttttacaaaacactactggaaccggatattcatatggaagaaaatgaacttcaatccttatctaactggacacataaaaattaatttgagattgatcacagacctaaacataaaatccaaaaatatgaagcttctagaaaaaaawatatatatttgaaacattggattakacaaacatttcttagataggacacaaaactcaccaaccataaaacgaattaaattgggcttcatcaaaattaaacagttgccttcatrtaaggacatcatttttaaatgrttatgcaagccacagactaggaaaaatattacaatacatatacctggcatckaatctataaactaacacccagaataaaaaagaacttctacaaatcaaaaacaaaaaaaaaaagacgagcaaatccagttatttaaataggtgaaaayttgaagagatactacacaacagaagatatacaaatcctcagtaaattcatgacaaagttgcttaacatcattggtaatttttaaaaattccatttgaaatcacagcgagatagcatttcacactgactagaagagctaacatgaaagagattcatgacactaagtgatggttaaggatatggtgtagctggaactctcagtgaaagtgtaaaaggatacaaccactttaaagaaattcaggaaatttcacattaagttaagcatgtactagccatataaccatatgactcctctctagacgtttatcaaaaagaattgaaaacatacatttacaaaactatttatacaaaaacattcaatagttttactcgtaatacataaaaccaaaagctgctcaaatgtccatccataaaagaacaggtaaacaaatttcattaaatttgtactgtggaatactactcaccgataaaaaaaaaataacagactactkgtatttgtgtgcatctcaggaacattatatggagataaaaaagctaggcacacaccaaaatatatattgtatgattccagttatgtcacattcaagaacaggttaaactaatctgtgaygacaaaactcaaaaagtgatttcctttgaaagggtgatctttgactagaaagggacaggaaagaacgtcctcgggtgataaaaaatattttatattttgtttggggtgtacttacaggtgtgtataaaattgtcaaaactcactgaactaaacattgaaaacggctttttatggtatgtaaatttaccccaattttaaaaattgattaacctgatattattcttactctttttaactataaaacttgttattatttttttgccaaaatctcttgtgcattttgaacttaatgtaaataccctttgttctattttcagttcttttatataaagactttatattaaatccacrtttaaatcagaaacactctgatgcaagcagatagagaaaacacgtctttttgtgtctcttccttgggaatgagaaaacttgccccagaatccacccagcaaatatmatttaattggccagaattggatcatgttccccatacctgaaccaatcactggcgagagaatgggctgtctttaaaccaatcaggagcacccctggatctgtaggtaggtcaggttctcctgaagcacacagctgtgtgaggaaaacaattgagattctgtatgaaaagatgaagagaggaatggatgacatgggagcaaccaatggtgtccactacaataggtgttactattactattagttttggaaagttaatgtttatttaacttatctaagatttataccccactatcctcttactttctactgtagacaacagaaagtaagacaaacagcaaatttataattttctctctgctgtgaatcccccaagcttgttacaggaaaatgaacaattattagagtaaaaatctgtttttattgggcatcaatgaacactcctagtgyagcaacttcagcagagaatcttttggttttaaagataaacattttgtttagatgtacatgttttcctatttacaaagtaatatcaaatgaccagctgaaaaatataatagaaaaaaagataccagcagcagcaacaaaaaccatcaagtacctgggaattaacagaatattgaagaacacagaatatggaatgcatatagaacattttatatktaaatacatacatataatatctttaaaatgayatactatacaatatacagtattaaagaatatattaataatgtcaatatactccaactcaaactacaaattcaattcaatcccaatcaaaagtccagctcgatttatttaggaacttgactgactcaatctaacatttatatggaagacgaaaggtctttagaaaagaacagctaagaggaccaagatggccgactaggaacagttggggtcagaggctcccatccagactaatgaaaactgtgagcgacctgcactggcaactaacgtatctaggttctctcactgggactgactaggtggctggcgcatggagagtgaggaaaggcagggtggagccgtggttcacctaggagctgcacaggacaaggggagctcccaccgccagccaagggaggcggcgactgattgtgctaccccgcctgggaaaccatgcttyttccacagatctgcaacccatggatcaggagacccctcatgagcccatgccaccagggccttgggtctcaagcacggagctgtgcagattctcagcagccgctgggctggagtccgtctaagacgactgagctcctggagggaggggtggcagccaacaccgcagctcctgtcagccattttcccctgccagtgccagggagattgggcagtttggacccaggagaaattccccacagtgcagcacagcagctatggcaaattgtggccagactgcctctttaggccagacccatacctccttaccaggcagggcctccctgctggaatttcagcaactccagccaagggtttaaggacagaactctgatcttcctggaacagagccccttgcagaaggagtggccatagtctccgcaggatcagctgactcagtctttccccctgctggctctgaggaatccgggcagtccggaagagtgggattcccaccagcacagcacacccgcttrtccaaggggcagtcagagtgcttccttaaacggatccyggatcccatgcctcctgactggatgagatcccccagtagaggtcgccagacactttataggggagcgttcccactggctcaggtaggtgcttctctgggtgggagctcccagaggaaggagcaggcagccatctctgctgttctgcagcctccactgatatctccagggaagggaggcacccaggtgaatagggcctggagtggacccccagcaaaccacagcagccctacggaagaggggcctgactgttaaaaggaaaacaaacagaaagcaacaaaaacaacaacagcatccgcaaaaagattcccacaaaaatctcaaaggccagcagcctcaaagatcaaagctagacaaactcacaaagatgagaaggaaccaacgaaaaaacgctgaaaactcagaaagccagagtgcctcttctcctccaaatgatctcaacacctttccagcaagagcacagaattgggcggctacagttgcacaggttcctttacctttatctggattgatccctcctcccttctttacttcacaactcaacccttcaagactcagtttaagagaagtcaattgcttattttataaagtctgttctragcctcccaggaggtggaatgagtgacgaaatcatttcagctctgtaggatcccaaawcattcactcactcaggactaactacatgtrtttcagatgagatgtgtacttgcctacatgcamgctagatggggacagggatatggytttatttaccttgttatccctaggacttagcacactaattatgtgcttcaaaatggctagaaatataatgaatgttgcagaatcataaaatctagcccaaccttattctggctgaattccttccacagttccacaattcttctagtataactactgggagtgtgggaatggagtctgaaggccatgtgagtattyatctctatgtatgagaaaactcaggaattaaaccaaaactatataaacttgaggtttaagatatttttacacattttttatgtmaaaagtaactcatactagttgcagaaaatataaatcgtaaaacacaactctaagcacattctttctttcatccattatcaaaagactatgatttggtacagtatcatatcctggttagcccttaatagattaaaaagaactgcagaatacattttcacctttaccgaacaggttcacctaacacaaaacttccaattgcctactgagtagacaaattaagcatgatccctgccctaggtgactttatatggtaatcccttgtcagcctctgggatgtacattcttaaaaaatcgtatttttgtcaaactctagattaacataaatcaaggtctcatataaaataggtctcatataaaattatttaaatagcattaaatatatatttttaaaaataaaatgatctgcttccaaaacaaatcagattcacgacattaaactcacttgttttagataatcctcatgaattaccttcttctattgttcaggwtacattgatgtgttatcattttgctaaggcaaaatcaatttcctcacaattttaatgtgtggcaggtcttttaggtctcagtattttttaactagaccttactggcttgaaatatacttttgttaacagctgcattctttttttttcttttattattattatactttaagttttagggtacatgtgcacaacgtgcaggtttgttacatatgtatacatgtgccatgttggtgtgctgcacccattaactcatcatttagcattaggtatatctcctaatgctatccctcccccctccccccaccccacaaaaggccccgatgtgtgatgttccccttcctgtgtccatgtgttctcattgttcaattcccacctatgagtgagaacatgcggtgtttggttttttgtccttgggatagtttgctgagaatgatggtttccagtttcatccatgtccctacaaaggacatgaactcatcattttttagggctgcatagtattccatggtgtatatgtgccacattttcttaatccagtctattgttgttggacatttaggttggttccaagtctttgctattgtgaatagtgccgctataaacatacgtgtgcatgtgtctttatagcagcatgaattataatcctttgggtatatacccagtaatgggatggctgggtcaaatggtatttctagttctagatccctgaggaatcgccacactgacttccacaatggttgaactagtttacagtcccaccaacagtgtaaaagtattcctatttctccacatcctctccagcacctgttgtttcctgactttttaatgatcaccattctaactggtgtgagatggtatctcattgtggttttgatttgcatttctctgatggccagtgatgatgagcattttttcgtgtgttttttggctgcataaatgtcttcttttgagaagtgtctgttcatatccttcgcccactttttgatggggtcgtttgtttttttcttgtaaatttgttggatttcattgtagattctggatattagccctttgtcagatgagtaggttgcaaaaattttctcccattctgtaggttgcctgttcactctgatggtattttcttttgctgtacagaagctctttagtttaattagatcccatttgtcaattttggcttttgttgccattgcttttggtgttttagacacaaagtccttgcccatgcctatgtcctgartggtattgcctaggttttcctctagtgtttttatggttttaggtctaacatgtaaatctttaatctatgttgaattaatttttgtataaggtgtaaggaagggatccagtttcagctttctacatatggctagccagtttgcattctttctggttttgttgcaacatgctcctgtaacacttgctttgccataagtgatcaaaatgcttaagggtagtttttctaatcatgtgtccacagattgagggagtggagagcacatgtgtgcacacacacacacacacacacacasagagagacacacacacacatattctctctctttattttcctcataaacacaaacctttgatatccgagcgtgggagctaaatttacattctttaatgagacttaaccaaataacttatttaatttttaatcaggcttatttatagatacaagaccctattatctctataaaagaaaaattgtccaaaacctggtatgggataaaaccctatttggtaatgttattcaagacttacctctgggaagaaattagacttcctgataaaatgcataacaatttttcgtgaggcttaatgggtttcggacttgttctaagaaaccagtaatctaccctcccagcagactctcactcagtgactgttaagaaatattaaatttttattccaacaaagatgagctaaccatyctcttttccgtaaaatgtccttamtaakataagtgcttatattgggtttatgtttgcrtatgggtttgggtcttccatatcatcattaaaagtttataatgagagaaggaatcaatcagtttcattctgtgaaggtcataccccatcttgataacagtgctctgtttaaaacaaaagggaacaattttgtatgttgaaaatgcatgtttgggtctgcaartctttagtgaaataaattcgccacagaaaatgtttatcagagtagctataacagaaagcatttaacagggaatttcatgyttaccacttgttttgaattctaaaaggtgatgtttttactataatgggagtacttatgtggaatactgtctaatttttaccatctgaagactgttcttgaaaartatctcatcatcttgggtcacttcagcctgacagtctattcatggaatcaactatctgtgatattagctgataactcattcttgtttgcctcatatatctgtttaaaaacattcgctgaatcccatgaagacatcttcttaaggtaaagtagaatgagaatcatctaaktaaatcaayragtgaactgcaatttttgtcaaaaccaatcttggcctagcagccaagttttttccatcagggaacatgatttccactctaccctgaatttaggacaaactccacaaaactggagttccatgaactattaatttaatagataagaactaattcccagatgttttatgctatttaaaatgaaagatttatttgcctctaagccatactcagaaaacttcacatggcaaaagcctcttcagcataaataaactgagaaaattacatgaaagtcaattttcttccctacttggaaatgtttgactttctgggatgaagaaattattataatttcctataaaattatagattcaactatatgagtgtaagcactaataaatatgtcttaatggaaatatggaaagttattgctggcatcctctacttccatattagaaaaccaaaagactcctcactctatcctatatttcatgaaacaagctacatgggctccatagtctgtatttggaacaagccatcagagtaataaatgcaatctgggatgagttgtaaaattacactagatgtgcttgaattgcacagttaaaagagatattggcttttttatttgatcattggacttcaggcaaagagttgttttattcccaagagatcctgtaatattaggaaagacctgcaggatgcagtagagacaaccggcaaaaccaaatttctataagctagataggtattagctgacagttgatcccatgggttgtggtatgaggtagacctcaattcaaagtgactatgccacttaccagcagatacttaaacccccctaagtctcagtttccccctcatgaaatgggattgaaaatagtacctatataagaatatataggtaatattttatttctttctagaaactaaatagtgccagtgtctactttcacttactacgtatcaaagtgtctttaatatagtaaatactcaagaaatagaagtgattatcaaaatcagtaagtgattaaccaaatcagtaagaattaccaacttaagcccattggttaaaaagcacagtctatgaagctagagttccaggatttaaatacaccctctactgcttcctagtgatcttgggttagttacaaagcctctctgctgtcaattttcttgtctgtaaaatgggaatgatgatggtacttacctcataaggttttcataatgattaaattaacacatgaaaagtgttcagaacagtgtctgacacagagaaaccactatataaatgtcaactgctgctattagtagtaaaaaccttgagttagaaaaatgttcttgagttagaaaccttgtagtatgtagaaaccttgagttagaaaaattcaagatcagatacaaatcaatacacatggccctgaactaagcaagaaaaatcatccatgttccattttctgggaaattcatagcttgaaagtgacacttgaagactattattcctggccatgtacagtgagccaaaaggacagaaacaaacgtgatggtgtgagggaggaagcctcycaccatcttacccaattkcataattacagttccctcccaaataaaccaaaagcttccacaagattcctcctctgctatcctgattttatctaggaattgaactattagcatcatccttttattttgcaaggtaagacatcattatcacacctgccaccatgcatcctataagagcatgaatctaagaacaaacaccctctctcccaccctctccatgcctgtgaaagccctgttcttgggtaaatgagaaagtatcaaagtaccttcctatcctctccccaaaaaaattatagttaagtttaccgtcttagaatgatattaaaggaaatkaaattacatgtaatttatcaggccacccaggccagatagaataactcctgagacttttctgggaatatgtgaataaaaacttggagaataaccccaaatccttcaaatttgtcctgggtacaatctttccaatacttacccacctccattaaatcagtcaactcttctttttttatctcagttatctccaccctagtgccaaacccatcatttcaccctagtgaatcatttgaagactacttgaccactgcaacaacatttcttcccactgcagccaaaataatttataattattcaaatatgwttgtaccagcaacctgatacaatttctttaatgattgctcattgcctttaagataaagtctcggccggggcggtggctcacacctgtaatcccagcactttgagaagccaagacgggcagatcacctaaggtcgggagtttgagaccagcctgaccaacatggagaaaccctgtctctattaaaattacaaaaaaaaaattgtccaggcattgtggcacatgcctgtaatcccagctacacaggaggctgaggcaggagaattgcttgaacccaggaggcggaggctgcggtaagccgagatcgtgccattgcactccagcgtaggcaataagagagaaactccatctcaaaaaaaaaaagaaacaaaaaaaaaacccataaagtctcaaattcttgatatgcttcacaagacccctcacatgtgagtggtggggagacaagcaaaatgagttgtggttggatagattccatcaccatatgcaaatgtgcaaacttgtctaactacattaacatattgtattagtcagggttctctagagggacagaactgataagatatacatatatatatatatgaaggggagtttgtttattaagtagtattaactcacataatcacaacgtcccacaataggctggggagcaaggaagtcagtccaagtcccaaggctgaagaacttgtagtctggtgttcaagggcaggaagmatccagcacgggagaaagatgtagtcttttcacattcttctgcctgctgttatcctagccatgctggcagctgattagattgtgcctacccagattaagggtgggtctgcctttcccagccaccgaatcaaatgttaatctcctttggcaacaccctcacagacacaccaaggatcaatactttgcatccttcaatccaatgaagttgacactgagtattaaccatcacacatacactactcaaacttataagaagtaaatttagtaattagagtacccaagatatactagacctttaataaaatatgcctaccagtgttgttgtcattatcatgatcttcattattattgctttcataatataaagagcattttaaagttttcctaatttctgcaaactgaatgtctccagctcccattacatgttgctgtgtaacaaactgccctaaaatacaattgcatttaaaaatcagtctgttatgctcacaattctctgtatataaaatttggttgggggaaaatggatatggcttatgtctgctccaaaatatctgggccctcrtctagggtagcacaaatggctgaagagggatgaggtgactaaattggggccataagacagtggccttgatttttttccctatggcatctgctgaggctggaatgtccaagatgtcttttttgctcacattccttgttctttgactggaatggctggaacagctagggsctgacctgcatcactctctctccatatggttttactacatagctagtttgagtgtctttacataatggtggttcacagtagttaaactttttagatagtgactggctttacttggagcattctaagaggccccataggatgctgaartttgttatgatcttccttggaagtctcaaaacatcacttccattgcactctwtgccagaccagatttaaaggaagaggagaaatagactctacctcttgacagagaaatggcatgttttagggtagaaggaattggtggtgaccattsttgcattcagtctactatagctcctcactgcctctctggccccaacaatcccttcccttctgacctctggatagcatgtatttatacgtccagatttgaaagtactacacttttcagtcacattacagaaccacattaatagtgatagctaaggctgggcgcagtggctgacacctgtaattccagcactttgagaggccgaggtgggcagatcaggaagtcaggagttmgagacaagcctggccaacatagtgaaacctcatctcgactaaaaatacaaaaattagctgggtgtgctggcaygcacctgtagtcccagctactcaggaggctgargcaggagaattgcttgaatctgggaggcagaggttgcagtgagccgagaccgcactattgcackcmagcctgggtgacagggcaagactccgtctcaaaaaaaaaaaaaaaatagtgatagctaacattaacagagcaacaactctgtaccaggcactgtcctcagttctttacatgagataattcatttaattctttaaacaatcttacaatatttttattatggtattttttagagacaataaaaatgaagtacacagaagttaactaaccttccacacaactagaatcagtggtactgccaggattgaaacccaggcaacattgcttcaaagtcatctgtcctaaccactacackgtattataaagatagtgccttttcatccattcattccacatctattgagtacctgcaactgttctagaacatgggggatgtagcagcaagtataaaataaaagatctccatcatgatagagataatttgctggtatgtgcacaggggtaaggggagatcagacaataaacatataaataagagaatgcrtagtctatctgatggtaataagtctatcctaatttcyttgagcacrgtaaggagagtaaggagtgtctagggtaaaaatggtagttactgtattcgaaagagtggttaggaaaggctgatttgataaggtaacatttgagcaagatctgaagagagtkagttagtaagccttgtagatattgggaggaaaagcctcctgagtagattgggacagcaagtgcatggacaatgagtgttatgttctaggaacaatggaataggagcayggaggccaagttagctcgcatggaatgaatccaagaagacatttctgttgctctagatcattgtcatgctggacaagtttaaagaacttcattactaatcyacgttggattccattgtgggtcttatccttccacacttgctctcctatagcaattcctttttcaaaacattaatatcgttatatttctgtaaaattatttacaaagtgtaaacaacccagatcatagccacaaatagaaataaaagctacaragtaacttatccaccccacccctatgatgtttcagagccaatgagaattgaaaggtgaggctgagctcttccattctctgaatgaagataaccaggcttcttgacttgaagaattccccaaactgactttgcctctttttacatctcagagtggtaggaaatcctaataatcatgtatcatttcctttctaaatatttttcaacyctgtactttcctgtttctcctccttcctctctgatttcttcttcatcttctctttgttgtcaggtgttctaataggtagtgtccaytgaggctctcattttggcaagcagctcttctcttgatttacccatttagccatttcatccactcccgtgacagatgatttccaaacttacatctttacctgtgtcctctcacagggattctgatctcatatttcctattacatagaggatatcttttttggttgttttgttgccagattcaaatatgacattgaaggcccccttttagctctaaaatgcaaaaagaaaattcctattaccaataaattttgaccacttttccaagcagccatgccatcaatggaaccactgttccaggagctgagacaatatcttggattgacttttacttatacttccccaccctcatttgaatcaagtccattaaaatgattctaacactttcatgccttcactggctgagtcctataaatgaaataatatatacataccagttaacagagtaactgacacatagtaagtactcgagaaaaaaaaatagttgcttgctctcaacaccaaaatgattttaattcctaactgaatagctctgcttatgctgttcaccacatccggaatccctcattcatttttttcttccacccactgaaaactagtccattcatcaagaatcaactttaattctacttcctcctctacttcctctacttcatactcttttctgcattctttgaaaaagaacatggtttttagtactataggttttgttatctagtagcacagaaaagagctactgtatagtaagcaattagaaaataagccatgaagcactttaagaacagactcagttctaaatcctctcttttatttccaaaatattgatggtttctgtgagacctcagttcttgtctccttagtttaaaagaatttaaataagagcacctggcaaagaaggtgcagcatacagtgatttattgcaaaagaaaaagaatattttgaaaggtaggtacagaatagacaggacaccctgagagagagaggattcagggtgggctgcccataaggatgagccagcaaagactggcactagggagactccctttatgggagttttacataataattcataagaaggtgggaagaggcgttactagtaggtatgttctgggtggtcctctgggtgcacatgcacagtagctgcacatgcttgttcatgcatcgtgtgtctcattagcatctgaaatctccacccaggagtgtatttttcactattgwaatgagcaaagcgccaatttgaggactggtaaaatccaagtgcacatgctctctagaaggaaaagtccccaccgcagatagctttgcttgaatgagctcaattatactgcgaacgctgaggcctgtgttggttgtatggccaccacgatcactgcktcctggcaacatggtcacttccttgactacctatcctgcctcaaatgcacataacccattgatagacccatagcaatgcaataaacacctgtcgactaactttcagattatgatctgattataaaaataagagktacagtctctgtcctcgtgcatcttacaatctagcaaagaaaatatayattaaactaataattattacaaacagttgttctctatgtttctgtgcagtgagatgtctccttcacatttcaagattagatcaatttttttcttttttctttctttcttgctttctttcgttctttcattctttcttttttcagggtctctacctctatacagcatgcagagctgttgccaagtctagcctcaaactactgggctcaagcaatgctgagtagctggaactacagacatgcaccaccacacccagctaatttttaaaattgtttcactcttctgactccaacttagtggttctcagccctgaataattttgcccccaggagatatttagcaatgtctagagacatttttggttattacawcagggcagggcaggggtggagggctgaggggagatgttactggcatctagcacgtaaataccaggattactgctaataaacatcctaggcggaagatagcatcccacaacagaaaattgtccacccctaatgacaatgcaaaggttaagaaatccttttttaagactgctctcttagacacgtctttggcatagttttctcctcaacccaccaccatgtattccttctaatccctaggctagtatatgcttataattacaaagtaataatttttgcaattttgtggggtttttattgagataaaatatacatataaaatttaccattcttaccatttttaagtgtacaattaagtgataatggctccatttatattctttttttcccttcaaacccttctccctcccactcttcctggcctttggtaaccaacaatcttctatcttcatgagatccactcttttagttctcacatatgagtgagaacatgtgatatttgtccttctgtgcttggcttatttcacttaacataatagcctctagttccaaccatgttgcaaatggcaggatttcattgtttgttatggctgaataattatgtgtatattctacattttctttattcattcatccatccattggcacttaggttgattccatattttggctattgtgaatagtgctgcaattaatgtgggaatgcagatatctctttgatatattgatctcctttttcttgtatatatactcagtattagaattgctggtagttctgtttttagtttttgcggaagctccatactgttgtctatattggctgtactagtttacattcccaccaagagtgtacaagggttcccctttctccacatctttaccagcatttgttattgcctttttgatacaaaccattttaactggaatgagatgatatttcattgtgattttgatttgcatttctctgatgattagtgatgatgtattaattcattttcacactgctgataaagacacacccgaaactggaaacaaaaagaggtttaattagacttacagttccacatgactggggaggcctcagaatcatggcaggaggcaaaagacacttcttacatggtggcagcaagagaaaaatgaggaagaaagaaaagcagaaacccctgataaatccatcagatctcgtgagacttattgactatcatgagaatagcatgggaaagaccagcccccatgattcaattacctccccctgggtccctcccataatgcgtggaacttctgggagatacaattcaagttgagattttggtggggacacagccaaaccatatcattccacccctggcctctccaaatctcatgtcctcacatttcaaaaccaatcatgccttctcaacagtcccccaaagtcttaattcatttcagcattaacccaaaagtccacagtccaaagtctcatctgagacaagacaagtctctttcgcctatgagcctataaaatcaaaagcaagctagttacttcctagatacaatgggggtmcaggtattggtaaatatagccataccaaatgggagaaattggccaaaacaaggggttccagggcccatgcggggaagtcaaatccagcaggcagtcaaattttaaaggtgcaaaatgatctcctttgactaggtctcacatcctagtcaagctgatgcaagaagtgggttcccgtggtcttgggcagctccacccctgtggctttgcagggtacagcctcccttctggctgctttcatgggatggcgtcgagtgtctgtggcttttccaggtgcatggtgcatgctgtcagtggatctaccattctgggacctggaggatggtggccctcttcccacagctccactagtcagtgccccagtagggactctgtgtgaggaccccaaccccacatttcccttccacactgacctagcagaggttctccatgagggccctgcccctgcagcaaacttttgcctgggcatccagacatttccatacatcttctgaaatctaggcagaggttcccaaacctcaattcttgacttctctgcacccacaggctcaacatcatgtggaggctgccaaggcttgggacttccaccctctgaacccacagcccaagctgtacattggcctctttcagccatgactagagcagcggagacacagggcaccaagtctctaggctgcacacagcttggcagccctgggcccagcccacaaaaacacttctttctcctaggcttctgggcctgtgatgggagaggctgccatgaaggtctgtgacatgacctggagacgttttccccatggtcttggggattagcattaggctccttgctacttatgcaaatttctgtagctggcttgaatttctctccagaaaatgggtttttcttttctatcacattgtcaggctggaaattttccaaacttctatgctctgtttccctttcaaaactgaatgcttttaacagcgcccaagtcacatcttgaatgctttgctgcttagacattttttccgccagataccctaaatcatctttctcaagttcaaagttccacaaatctttagggcaggggcaaaaccctgccagtctctttgctaaaacataacaggagtcaccttggctccagttcccaacaagttcctcatctccatctgagacaacctcagcctggaccttatttttcgtgtcactatcagcattttcatcaaaaccattcagcaagtctctaggaagttccaaactttcccacattttcctgtctttttctgagccctccaaactgttccaacctctgcttgttacccagttcctaagtcgcttccacatttttgggtatcttttcagcaacgccccactctactggtaccaatttaccatattagttcattttcatgctgctgataaagacatacccaaaactggaaacaaaaagaggtttaattggacttacagttccacatggctgggaggcctcagaatcatggcaggaggcaaaaggcactttttacatagtggcagcaagagaaaaatgaagaagcaaaagtagaaacccctgataaacccattagttctcacaagacttattcactatcatgagaatagcatgggaaagaccagcccccatgattcaattacctccccctgggtattttgggtctctcccacaacacgtaggacttctgggagatacaattcaagttgagattttggtggggacacagccaaaccatatcaaatgctgaatattttttcatgtaactgttggccatttgtatgtcttcttttgagaaatgttaataccaatcttttgcccatttttaattaatttttttgctattaaatagtttgagcttcttatatgttctggttattaataccttctcagatggatagtgtgcaaatattttctcccattctgtaagttgtctcttcactttgttgattgtttcctstgctgtgcagaagccttgtagcttgatgtaatcccatttgtctatttttgctttggttacttgtgcttttgagatcttacagagtaaacctttgcccaggccagtgtcctggagattttcccccaatgtttcyttctagtagtttcatggttttaggtcttagatttaagtgtttaatccatattgactgaatttttgcatatagtgagagatagaggtctagtttaattcttctgcatatggatatccagttttctagcactacttactgaaaagactgtcccttctccattttatttcttggtgcctttrtcaaagatgagttggctgtaaatgtgtgtatctatatctggattctctattctgttccgttgttgtatgtatctatttttatgtgagtaccatgatgtttttgttactataaatttatagtaagctttgaaatcaggtagtgtgataccttcagttttgttctttttgctcagtattaccttggctattgagggtcttttgtggttccagatacattatagaatttttttttctgtctctgtgaagaatgtcattggtattttgatatggattgcattgaatctgtgcattgctttgggtattattgtcaatttaacaatattaattattatattaatttcatttcttttcagaattttatagttttccttgtaytgaccttgcacttctttggttagattgattcctaggtatttgatatttttgtagctattgtaaatgcaattaccttcctaatatctttttcagattgtttactatttgtatatataaatgctgctgatttttatatgttaattttgtatcctgcaaatttactgatttttttttttttttttttttgcctagtcattccagtcaagacttccagtgttatgttgaaaaaaagtggtgaaagtgggcatccttgtgtttgttccattccttagaggaaaggccttcaatgtttcyccattcagtacaatgttagccatgggtttgtcatatatggcctttattattttaaggtgtgttccttttatacccattctgatgaggattttcatcataaagaatgctgaattttatcacatgcttttttggcatctattgaaataaccatacggtttttgttcttgattctgtgaatgtgatgtgtcacacttattagtttgcatatgttgagccatccttgcatccctagaataatcccacttgatcaagatgaatgatctttttgattgttgttgaaattgttttgctagtattttgttcaggattttgtgcatttatgttcatcagtgatattggcctgtaattttatttttttcttcttgtgtacttgtctggttttggtttcagcataatgctggcctcatagaatgagtctggaagtgttccttcctcttcagtttttttgaagagtttgagtagaattggtgttagtttattatctttaaatgtttggcaaaattcagcagtgaagccatcaggtcttgaaatttttattgatgagaggttttttattatgcctttgatcycattactcaatactggtttgttgaggttttctatttcttcgtagttcaatattcatcaattgtacatgtccagatatttgtccatttcttctgggttttccaatttgttgstatatagttgwtcataatactgtccacagattctttgtatttctgaagtctcatttattatgtctcctttttcattactgaatttatttatttaggtcttctttttttctcagtctagctaaaggttagtcaatttycttttcaaaaaactaacttcttgtttcatctatcttctgtaaattttgtctcaattttatttattttggctctgatcttcattatttatttccttctactgattttgggcttggtttcttcttgcttttccagtttcttcaggtgcactgttaggttgtgtatttgaaracttcctactttttgataaatgtatttatcgccataaacttctcccttaggactgtttttgatgtatcccacagattttgatatgttgtatttccatttttattggctttgagaaatttaaaaaatttccttcttaatttcctcattgacccattggtttttcaggagcatgttgtttaattttcatgtgtttttgtattttctgaggtccctcttgctactgatttctagttttatttcattatggtcagaaaaaaacacttgatacaatttayatatttttkaatttgttcagacttgcgttgtgtcctaacatatggtctatcctggaggatgtgccatgtgctgatgagaagaatgtgtattctgtagcagttgggtgaaatgttctataaatttcagtcaggcctatttgatctggtatatagtttaaccatggtgcttctttgttgattttctgtctggatgatctgtccattactgagagtgagatgttaaatatcctattattattatacagcagtgtatctcttcctttagatctattaatatytgctttatatacktggaagctctgatgttaggtgcatagatatttataatttttatatcctcttgccaaattgactcctttatcattatatagtgaacttcttcgtgattttttataaccttagctttttactctagtttatctgttataagtgtagctacttttgctttttattggtttccagttgcatggaatattttttccaccccttcactttcagcttatgtgtgcctttataggtgaagtgagtttcttgaaggcagcatatagttgggtcttgtttctttatcaattcagtcactttatgacttttaattggagaattgagaccatttatagtcagtgttattgataagtaaggacttactactgccattttattgcctattttctggttgttttgagactactgtcttcctttctcagtctttttttttttccatgtttaagtgattttccctggtagtatgttttaatttcttcatttttatttttggtgaatctattataggtttttgcatggttaccatgaggcttacaaaaaaaaaccatagatatcacaagttattttaaacagatgacatttaccttagatcacacaataaagaccagaaataaaggcaaaaaacacacatamgaaaaaatctacactttaactctatcaccctcatattttgagttttagttgtctcaatttacattttttacaytccatatcttttaataagttgctgtagctattattgttttwgacagatttgtcttttgggctttattatcagagttgtgagtagattgcacaccaccattataggaatagagtattcttggtttgtctacgtacttaattctaccagtgggttttacaccttgaaaagttttctttttgtgcattatttttttttctatttcagactgaagatctcccttcagcatttcttgtaagacagatctgctggtggtgaattctctcaacttttgcttgtctgggaaagactttatctctctttcatagttgaagaataatttggctgggcacaatattcttggatggcagattttcttttctttgaacactttgaaaatgtcattccattccctcctggatacatctatgcctttgtattgaaggattaattattttttcaaatttcctctgacaggcttgttttgtttttttagtggatatatttgcctagaaaatctttaccactatgttgcagccttctttttggccctaggtgtgtcttaagtccaggttcaccttggctttggtaaatgatcagagtgatgtccgttttsaatgggtgaggtcctaaagggacctggcactgttagaaggctagctaggagtttacacccaaggaaactatgaaacgtaccttctatggtgtgatgctcctgaacaaccattctgatttgatgtcttcttttgccaagttgcagagcagagtttccagggctgggggtggtagttccacttccctcctttgtcttcrcctgtcctctgtgaagtttctcccttcaggcagccacagtgcttcccttgggttaagacaataacaggtctcctcccaagatatccaagatggtagaaaagctggttggccatctcaatctcactccttcccttgtagaaaccatgagttggagaagattttccaggtgctagttgccaggcagaatggggggatggggtgtcatggatgtgaaagtctgattctcccaccatctgctcaaagtactctcatttctctgtgtccccaggatctgtctcatcctcatatttgattctgggttgttgctgtatatttgtttttggttttctggcaaggaggtggggtagtaagaccagcttgcttctatgccaccatttaaactgaaagtctaagatcactttgtctcagacaaatactaatcttcttaaaatggtgtataatgtgtgagaatggagtattttgtcaaaggaaaacaaatgtaaatctctatctcctacagaaatgagtttattttctcacttttagccttccattgaaaaaaagcagtgtgtcaaagccagcctacttattattccgcacccttaaaacatatttcagtgatgaatctgacaagctatactcagatttttttcagctattataactgtgctattataaaaatgaagcctgtaagaatctttcaaaaggtagaagtcaatcatgtaactcattaattctacatgaaaaagtcacatcaaagacagacttttttttatgattaaaaaaagtcttataaaaaaaggaaaaaaggccaggcatggtgactcatgcctgtaatcccagcacttcaggaggctaaagcaggtggattgcttgagctcaagagttcaagaccaccctgggtaatatgrcaaaaccctgtctctrtaaaaaaaaatacaaaaaatactatctgggtgtggtaacatgtgcctgtagtcccagctatttgggaggctgaggtgggagggaggtggaggttgtagtgagccatgattatgccactgcactccaacctgagcaacagagtgagaccctgtctccaaaagaggaaaaagaaaaaccaaaccagataatgacattgttaatagcacggattattatttaaaataacagtagcttcaaatatagtgatattkgtagctctgtcctttcatttaaaggagcatatattcatttaaattatatcaaaatctttgaatattttagtttaaaatacttatacactgtctatatagaaaaccaagcaatagttacttaggaaatttctactttgaaatcaatgtgaatttctgacagcaggctcattccctcactcactccactccttccatgctggcctctttgcttttgcttgccttccagggaatctcctgtctcagagcctttgcattttctcctccctctcctggacacttctcccctaaagactcacatggttcgtcctctcaccttcttcagatattcacataaatatcaccttctgaaggaggtcttctttgactctgctatggtttggatacttgacctctctaaacctcatgttgaaatataatccccaatgttcagggtggggcctagtgggaggggtttgagtcatggaggtggatccatcatgaatggcttggtgccatccttgaggtaatgagtgagttctaggtaatgagtgagttctcgctctattagttcctacaacagctggttgttaaaaagagcctgacacctccttctttctctctcactttttttctcaccatgtgatctctgtacatgccagctccacttctccttctgccacaagtggaagtagtctgaaactctcaccaaaagtaaatgctgacatcatgcttcttgtacaacctgcagaaccatgagccaaataaacctcttttttaaatatataaattatcaagcctcgggtattcctttatagcaacacgaacagactaaggycgatgcygtcaattttctgtaatcccatttcctacactacttttcgtcattgcatttatccctttctaatgtattacgtttatctctttctaatgtattacatattttacttctttactacaattcagtaaatatgtattgcattaatcagtaaataaaaggaaggaaagtagggatgccagtgacatacattttgcttgaatggatttgtatgcaccatgtgactctgagtctataatgctggtggcagcttcttactccagttcatagctaaggtggtctgacgctggaatcaagagtttgggatagtgtcttcctgactccccagctttctgaaggttgcagaggtagccctttctttggtgagctggttcttggttgacattctggaagtcaatcccagagacatagcctaaaaccagctcttccccatgattaacctctttcttttctgattatcctaatgtttcctgtcacctacaactgagccccaactaataaagtattgtatccccatttcacaacaagaaaacaaagtatcaggaaaataaaatgacaacaataagtcaagcccaagtttatatgatcccacaaacaaaatgaactgtaagatattacaaaagatatggatgaatagccagacagagtacattcatagggcaatgtatgtggaaaggaaagtgaaatttccatgccctctgtgggcatatcaccctccagacacctccacrtgttcagcaatccagaagcctttctgaacactattcttttgggtttttatggaggcttcattacataggcatgattgattacattattagccattggtgatcaacttaaccttcagcctttctctgctgcttgcagggattggggagtagggttggggaggctgaaactcccaactctctaatcatgccttggtctttccagtgacccccatcctgaaactacctaggtgctcttagccactgttatctcagtaacatacaaagaaaaaaaactcttatcactcaggagattccaaggattttaggagctgtactccaggaaatggaatgaagatcaaatatgtatttcacaacatcacagaacaatcctagctccctctgccaatggctcagaatatttaaaacctactcagtccaagaaattcctcttctaatcctaagaaacatagatttatggaactaatgataaatgtgttctttccagtccagctctgtttctggaattctttgcatttcctaccaatgcctgttaagagtgttcccaaaaacaataaaatcttgccgctcaatagttgagtgtttggcataatgtataatgtatgatattttaggaattttcaagaaacattgcagtggaaaactcaaattcagtcacaaaagtgactctttgcttataaaacagtcattgtgggtttacaatctgtattagaatcaaatcttctttcatctgcaactggcttgttttccttttctggttagtcagttgatgacgtgtgatttgggacaatcaggggctgagaatctggcggttacttctagtcttttgcacaatctaaggcaactaaacctctttccatgtttagttattttttgtgtatttgtggagtttgcttttgaaatggaaatttttttgagaaaaccatctcagaaaaaacatggacagggaaaattctatccattatttacataacatcaaacagacaagccaaggacaggctgcttctctgaagaactaaatctggaaacaggagatttcacaatgtagaaagcaaatgaagttggagagagcagaggatgaataggcccratatgttttctttcagaaatatttgaaagttagcaatgcaaagttattaaacaatacatgggttaattttttgtacttttatcacactgtttcattgtgagtgcaatctcagctcactatagcctctgcctcccaggctcaagcaatccttccacctcagcctcctgagtagctgggaccacaggcatgcaccaccacaaccggctatttgtttgttcattttgtatttttggtggagatggggttttgccacattgcccaggctggtctcgatctcctgagcttaagtgatccaccagcctcagcctcagcctttcaaagtgctgggattacaggcatgagccactgcacttgaccctgtgttttttctatttatttaaagagttatttcataagtttttaaaaagtggtccaaaaaagtacagaaggaatgaatagtcccttcaaagttataaattagataatgagaaattgtataaaagttaataaaagagagattmtctctttgcaattgcaacattaaatcttccactgctcaaatggaaatcagatcctaacaacaaagagactgccctttaagaactgcagtttcctattatttaatcatttattagatttagcagagagggagactagagaaagagaataaaatctttgttaccaatatatattatgtttttaaggattttatattagagaattatggcaccagaaaaaaatctgttacataaaatgtcatcctcaatatattatgtagtaagtataaataagtaggataactcccagaatgcaccaggaagattcagagcagaagaattgctatgagtgtgcaggggttggggaatgaccctctgtgtaatcaggcatgtataaggtgaaaaagaaatttctaggacgaagtctcatgtttggatctgtaagatttgctaaagggccaaaattgtacatgctttgactaattattaaattccacagccagacacactgcccccccmcacacacacacacatgattgttcaattaatatctgtcaaacagcttgatactcataaatgcagatgcacatattaactcctttcttccttcttcttgtctaaatggtgaaagaacgagaaacaccaagttctgtccatgaagcaacaagacagtagtctaaggatactggagcagaaagatgcaaaagaggtgggtctttgaagaaatcaaggaactgcttcctctggatcatttgttatatgagattattaactgtttttagtccacgcagtggctcacacctgtaatcccagcactttgggaggccaaggcagcagatcatctgaggtcaggagttcaagataagcctggccaatatggcaaaaccctgtctctactaaaaatacgaaaattagccgggtgtggtggtgtgcacctatagtcccagctactgggaaggctgaggcaggagaatcacttgaacccataagttggaggctgcagtgagccaagatcatgccactgcactctagcctgggcaacacagtgagactccatctcaaaagaaaaaaaaaagtgtttattctttatttctgaaatctctgttattcaggtcatttattacacacagcaaaaagcattcctaacagatgtatttctttttctcttcttttctttttttagtaatagcagtgaatgcagcacctaacttatgtacttctattgatgtacttctaaaaggaggaatttttattttttcaagatcctcaaaaatatacccactctgatttgatggctccttcaccacagcagcccaaaacaaaacaagcaaataaagtcacttgcttgcttatatctgcaattcgtcatttcatagaacaacttacctaggacatgtggtatcaattctcacttgatagtataggacctacctttgaccttgtctttgggatctgctttaagagaattctctgctttggagattttttggctcatagattcagattatcctcaacatatctgtttatctgttttttattttaattagatcattgaaattaaaataattttaattgtttaatttaaaccaggttttctggtttagccattattaagcttttgtcttctaagtaatcacactgctaccckgtgtaaataaccacttctgaaactttcctcataaaccatctttttkctggattattccctcaaagaatcacaaatcactatctgtgccacttatcaatttatagcatcccagttccagattaacctttgtcttgctttgtgatacaggagctggactacgtaaaggtttctcttttgtcagagggtgcaatgttaggctttgtcaacagagggcagaagagggacattgcaggaggaagggacttttcctgatttttgtgtgcctttttgctcccatagcacttgacagctagcagtgtgtggaacacccagtggcattcatgctccagcaagttttgccagcacccctgtaaagtcttgttagctccttagagggtggctttccagtgagtttcaccagcattccagaggcctgattcccagttagttcactggtaaccccaacaggcagtttccagccacccctgacctttgggacctcagcaaatttatctgccatgaactgggccacaccatctccatataggagtttagatctcaatgttggcctccttggaagtcttttccctcaatgggtacttggcctcagctacagaggtaatagttacttccaatatctgctactattgtattctgtagcrttctccttattgcttcttagttaatcctattattaattaattcttagttcattataataattctttatatttgaaatattccattcaagttactgagtagtttctatctcctgactgtaccctgactgacacaacatttctaggaggttcataggaattctgcatggggtttcttttttgtcacaaatgtcaggagcttactgcattctaaactaaattaacttatatggtggaatgtcaggcatgtaaggccaaataatctagcacattaattaatyatcatatattattttgcaaagatccaaaaatcagaaaagtctcraagaaattgaacttctattagggtagacttccttaaaccaattaacatgtattttaattgtgtctccaagacatgattttgaagatcagcctgagaattaaattgtacatctaaatgctttaatgtttggggaagtgtttggataccagaagtagactccactgttgcttacagctcaagagtttgaaatattttttacttctactaacagtgagcatatagacaaactactcttttaacctatatactttcaacccacacaattgaattcagaatatttaaattttttaagtttgtgctattctttctcaagaatgactaatagtggagaaaatatttgcaaataatatatttgataaggaatctgataggggtctaacattttaaacatattaaaaactcatacatctcaataataaaatgactaacaacccaattaaaaatgggcaaaggacttgcatagacatatttctatagaagacatacaaayggccaataagcacatgaaaagatgctcaacattattcagtcatttggaaaatgcacactaaaaccacaatgagataccattttacawccactgagatggatattatatatatatatatatatatattttttttttttttgagatggagtctcactctgtcatccaggctggagtgcagtggctcaatctcagctggctgcaacctccgcctcccgggttcaagtgattctcctgcctcagcctcccaaatagctgggactacaggctgtgtcaccatgcccggctaatttttgtatttttagtagagacagggtttcaccatgtgggccaggctggtctcaaactccagacctcaggtgatctacccacctcggcctcccaaagtgctgggattacaggcgtgagccaccgcacctggcctgagatggatttaattttaaagaacagaaagtaataaaagttggtgagcatgtgaaaaactggagccctgatacattattaatggaatgtaaaatggttcagcgctatagaaaagagtttggctgttctgcaataagttaaacataaaattggcatatgatacagcaattttactcccagatatataccaaaaagaactgaaaacagatagtcaaacaaaaatttttgtacacaaatgttcctagcaacactattcatagtagataaaaagtagaaacmacgcaaatgtccatgaattaatgaatgcataaacaaaatgtggtagatccatttaatggaatattattcagccatgaaaaaacaatgcttcagtgtggatgaaactaaaatgttacatattttagagcagcatgctgcacatgctgcaatgtggatgaatctaaaaaacattacactaagtgtattagtccactcttgcattgctataaagaaataccctgaaactgggtaattaataaagaaaagaagattagctcacggttctgcaggctgtacaggaagcatggcagcatctacttggctacttggcttctggggaggccttgggaaactttcagtcatggcggaaggtgatggggaagcaggcacatcttacgtggctggagcaggaggaagagagcaaagggtgaggtgctacacatttttaaacaaccagatatcatgagaattcactcactatcatgagaacaacaagggggaaatgcaccctcacaatccaatcaccccccagcaggcccctcctctaacactggggattacaatttgacatgggatttgggcagggacactgatccaaaccatatcaccaagtgaaagaattcagacacagaaaaccacatgctgtatgattcgatttatatgaaatatactcartagatcaatccatagaaaagtagtcaccaggggctacagggaggaggaaatgggaagggactgcttaatgggtagagggttcccttttggggtaatgaacatgtgctggaactagatgctggtgactgtaacacaaagttgtaaatgtattaagcgcccctgaattgtacaatttaaaacagttaaaatggtgatctttatactatgtgttttgtactgtaataaaaaagatagattatgaaagggaaggaattagagagggaaaacatggacatttctttcagaacttttgctgtaagggggagttgataaatggtgcagtggatatggagcaaagggaaaggttttaaaatattgaagataggtgcattttataattattaagtagatgctgtagaatgaatgaataaatgaggtatggctaccaaacaggcatagggagtgtcagagttcacctcaggatgaatagatgaagactgacattgaatctttagagccataacagatatcatgacccactttttccactgacactcatggcctcactatgctaaagaaatgaattatggcactaggaaagcaatataaaatatagatgaccatagaaaataaccgatgcattgcttagaaaagcaattagatttcaccccgatttgtcttcccctagtgagttagtggataaactcactcatgtgtgctaatagctggttgtatgaatgagaaatcgtattcctattgatacattgttggtgaatatatcagatgaataactcatagaactggatggttgcatataaatatgcactgataaactccaaatgcggattgaaaatattctatgaatcattagaaatctgcttattgaagattcccattattaaattattaaaattagtattcatatctccatctaattatcttacttttctaaatcctttttttatggaaatacaaaggtaaagagagatatatacaaaggtagaaagaggattaaaatgaccctccatatatgtatcacccaagttcaacaactatcaacccacagccaatcttgttttgaactacatccactcctttttctacttcttggggattattttgaagtaaatcccagataatgtaccattttacctgtaactatgttagtatgtatcttttaagcataaggccattctttaaaaacaaaaccaccatgccattttcatataaaaaataaataataattgctaaatatcatcccttttaacctgaccttccactatctagttgacaaagagttcatccagtgcaaaaacttatattctgcaacttaaaattctatcagwggttgaagtaacactgacataaattgaatccagttaatttcagacaagaagtgcacagttcataagaaaaaagttttataacagatgcaacttagccaatgaggagtgattgattctggaacattcagagaaaaaggctatagttacctatactcaatagtgtrtcaaagaggaaaggtgctagctagaaaattctatccacccaccacatatcctgatcattttattgagatgttcaacaactgccctgtatggacttgacrtggtcaaagagagatgctttttggttttaagggcagcatcttggagagagataatagagagttttccaggattcattaaatttatcaaagactaaccatttcagataaaatgaaatgctgcctttagaggaaatgcatactgtcaggaagccaaaagtctccagatgttagggaactgcaagttttgagattaaacacgtaaattcagtttttcaactgtgaaggtactgactctgaaaataaaagacattagataaactggccatacaaatattgatttacagatcctgattctcttccccatagtttatgtttttaagaggaatggaatgtgtgattagacttggaagaacacattttgtgggagacttaccagagtgatcaaaataaaagaataataagggaggaagagcatttggaagtgaagtttataggagggaaaattctctcaaaaaagttataaaatagtactctgtgaaagacaactgatatgacatagaaggttgaactactcgccaggagagatcagacattaacttttgtgccccctgtatttcatctttctttgaaccaggtaagtgcttgtatcagtgaggattagagtaagctacatataacaggaaaaaaaatcaagacaggactttatttctcatttacataaaataagtctggaggtagccagttgcgggtttatgagacagctttacaaagttgttatgtactcagatttgtccatatcactgatttactatccttagcttatcctttgtcttcattgcccaaaatgctgctggagcaccagccattttatctatattccaagcagcaaaataaagaatgagaagaaaggttgctccattttgtagatatattctagtaatgcccacataaaatttgagtaaaacatattctcttggccacacctatatgcaagagacactggaaaatgtaatcatttagctgggtgccatgtgcaaaactaaaaaaaaaacaaagatgttgggaaacaattctcagcttttgccatagaactcagcatagaataaagatcgattcagaaaagagagaataagtacatttcaggaggaaaaaaatagtaaatatgttgaggcaaatgagtgtgtgattagagctgggcatggtggctcacacctacaatcccagcaccttgggaggcagaggtaggagggttgcttgagctcaggagtttgagaccagcctgggcaacgtggtgagaccttgtctctacgaaaaattagccaggcatggyggtgcatgcctgtagtcccagctacttgggaggctgagacaagaggatcactcgagacaggaggtcgaggctagagtaagctgtgattgctactgcactccagccygggcaaaagagtgatgctctttaaccattatttactgagatcacataacatgctaaacactatgctagatgctttatatacatcattgcatgacataaacaacacagcactgaggtggtagatacaattaacctgattttacaaataagaaaactcagccttagagaggttgggcaacttgctgaaggttacacagctactagatagaagagccatgatgcaaaccaagttctacttgattccaaagtctatttttcaaaaatcctcttcatctacgagggttagagaacaatacaaaataaaaataaagaaattaatataaaataaataaaagaaaataaaaataaattaaacatgatttaaaattaaatcaaagaaaaatcctcagtgtggtccccatagtggcagcctkggaattacctgaagctgttaaaaaagcagactccccagccccaccccaaactactaaattttaacctgatttagccaagaccccaaggtaaatagcccattataagtggagaaatatcactctctaccaccctaccataaatatatcagatctcactgataataaaaccccaaatttagtcttaggtactaagttgcagtgtgagtttctataataacactaattcctcatatgtcattaacaaataggggaatgatttccaaacggcatggaagttacctttgtaactttgtgtttcccagcacattaattttttgatcccatcargttcatgtaaaacacattaacacagctgagcatctagccacagagaacaaaggactgcacatagtgcccattcacttcaagttagcttttggctcactttatctccatgttgtgtctttggactgcttactgcagcaagcacttaatctctgcatttgactcttttctcataactcagtaacttctaccttttgttacacccttctctccaagcactttcaccttctttgtggtaaaagtactatatttgctatattatttccttgattggtggcaatttaacatatatttaataatttttattaggattgttagcacttttgttagttgcattggttttaagaaatctatctcaaccctatttttcctgagttttcccaataatttttccaagcaatttcacagaatcaaaggaacaatgtatattgtattaaaacaaaaatgtctgcattctggaatggcgaggggatttcagaataaacactaaccttctgcttttagaaagcaactattattttttctttctgtttttggagctgggggtctgctatgttgcccaggctggacttgaactcctgggctcaagccatcctcctgagtagttgggactacaggtgcacactacctatccagctagcactcattattctcaaagatgcggcacaattgtggaagatatgatgggctttaaaatagaggaaatgcatcaaaatactcactgagaaaaattcccagctagagttaaaaatgctcccagtattgaaatattagcataatgaaattttctgagagaagtccaagtgattaacataagaccttgacccagcttctgcctctgaggcttcccctcatctccacttcggtccttgataaactcacatttccatctggcccagagactaccccctattatccctgggcccactcctggcccctggtgattttccactgctgatacatacctgcgtgagcagacccttagcccagccataatagggatgcttgcagccgctttctggagtcctgcctcaaaccccaaacctcagctcaaacgttaaaactcaaacctcagcttctgcttgaagttgaggatgtgactgtgaatgaaacctatgttttctaaggcttacaaaactctttctctcggtttctctctctctttctttttytctctctctcacacacatgcacacactattatcactaatttaattaatatctagtgaattaggaattgtttcaaataatgacattttgtccttaattcccctacatctcatataatgtttatgtctgattatgacatttcttccttgaattttgtccttaaaatgcattccctttttgaccaaaaccccttgtaaggatactgttggcactagaaggaaagccagaatctacagtttttaaagtcactttcagtccatttttctttgcttagcccaaaaccttaaaaaggctattcactctttctgaacttttctttgatcatcatattttataytttgatttttatttaaataaaaatttttaaaaacctggtgcaccacatgtttaatacccaycctcccgaacattgaaatatctattttcttgtcttattcttctcttcacctaattcctcctacttactataataataataatactttttttttttgagactcgagtctccctctgtcgccaggctggagtgcatgacctcagctcactgcaacctctgcctcccaggttcaagcaattctcctgcctcagcctccctagtagctgggactacaggcatgtgccacgactcccagctaatttttgtatttttagtagagacggggtttcaccatgttggccaggatggtctcgctctcttgaccttgtgatccacccacctcggcctcccaaagtgctgggattctataattattttaatgttatagagaatcctgttttaaaagtttgccagttcagaggagcaagtctacaacagtatatgtaaatcttaaacaaatctgctactgtaagttttatcatctttttctataacagtatattttctctctttttttgccataacagtttttatctcacaaaaaaaactctcagttgtgtgtgtggggggggtgtcatcataaaataacgtgatatagacagaacgcagctgtttttatagatatactcaagacagtggcaacacccagtttctcagtgatttccccaaatcatacaagtcatcaactgactaatcagaaaaggaaagcataccatttgcaactgaagaaagacaaaatctgtaactgaaatctgtcctctcatggttttagtcaaacaaattcacaattactaattttgacaaatgcacattcatcagataagtatttccagggagaagagatactgcagctaactcctgcaataagaaatttaacttgacattttaatacaaggaggtggatgggtatgttgataagaggagactccaagccagaataaaacatacaacttgttcaaagaatcaaatccagccatttaggggattaggactgtatgtgaagaaacwatattaaaatctacaaatgggaaggcgggctcagagttgggagctctgagtaagaataaatagttcaagagaaaagaaatgtagtactttgggaggtaacttggggtaggagaacagcatgtaagagaaagatggagagagacagagaagagagagagaagacagagagagagaggagagagaagacagagagagagagagaataattttcaaatataaacataaaacaggatatagtcagaatggggcagagtatcccggtgtttactgatgttcttataaattgaatatctgataaatatttcccataccttgcttgatatcttattattcagaaagcagataaaactagagtaatacctgccatttattaattactcagttccaagcactatactaagcactttgtgtatgtgatcctattgaattatttcaaacatcatgacaagtattaccctcattttattaataaagaaatcaaagctcagacattaattgtacatgttaaaacagctgggaggtagaagagaagaatttgaacccaaagcccatgttcataaccatcccccaaaagtagaaaaataaatgtcttaagaaaaaggtaagcctgttgatttaaatattagaatcagacttgctgctagaaatgaggaaaagagaattgtttttattcaaatacagatgaaaaatatatggttccatgaacaaaaactctaaaagctaatgtaatataagagagacaagaagtggcaatgcatattcacctggccatagtttgaagctgggattgatttaaactgaaatttaatatgaacgacaacgtcttcaccatgcaacatggttgtgtgattcttaacctgacaggagacttttcccacatgattagttttgaggtcatttagcagctgatacaccgaaattattttgaagtgaagaattaaattgttcactggcagaaatctaatttctgttgcaaggagtttaattgttaatgagcttgtattttttttttttttgagatgatgcaacaactgccactgttgagtttgcttaaagccacaccagcaggaaggatttaagtgctttgagcatctaatctatattggtcgagggaaagcatgcttaaaatgttaaaagtgcttgtactccttcactccccagcttgggattttaacaactatccttaatgccaatttcttaaagtctccattaaaaacaaaccaaaagaacataaaatatttggctaactacaacagaaattcacttgataaagctttgagctgtggccagtatggccacttagctaatggactccagccagtgagacgaaccttgccccaacccaaaaacagtggacccacagtgagtggagcacaagactgtccactttcttatccatctcctatatcagcataagaagggtaaaagtgaggtgttctgtgtgtcattaaaatcctggaagtgtccagaagtagtggttgctgacaatgaggagtatatggacttaaatgtctgcttttcctgtgtgttttactttaaaatgaaaatacattcagaaactggacacaaaatttctttttaaaatacgtttttattattatggattcataatagttgtacacaattataaggtacgtctgacatttcaatacaagcatacaatgtgtaacaaaccatggtaattggggtatccatcacctcaagtatttatcatttctttgtgttagaaacattccaattccactcttttagttattttgaaatatatagtaagttattaactatagtttccctattgtgctaccaaacactagactttattccttctttctaattgtatttttgtaccaaatctgagggggcagattttgtactcatctgccccctccccactacctttcccaggctctggtaaccatcattctaccttctatctcaatgagttcttttttttttttttaagctcccacatattagtgtgaacattcacactaatgtctttctgtgcctggtttatttcacttaatgtcttccagttctatccatgttgcagcaaatgaaaggactttttttcttttttatggctgaaaaatattatcttgtgtatgtgtaccacattttctttacccatctatccactgatggacacttacgttgataccatatcttgacaattgtgaatcttgctgcaataaatgtgagagggcagataccactctgatgtactgatttcctttttttttgggggggggtatttactcaggagtgggattgctggctcatatggtggctctatatttaggtttttaaggaatctctatactgttcttcacagtgctgtactaacatacattcctaccaacagtgtacgagtgtttctctttctccacatctttatcagcattcattattgcctgtattttggataaaagccatttcaactgggatgagattatacctcatcctagttttgatatgcatttctctgatgattagtgatgttaagcattttttcatatccctgttggccatttgtatgtcttttttgagaaataaccattcaggtcttttgctcaattttaattggattattttcctattatattgtttgagctccttatatattatggctattaattctgtgatagatgagtagtttgcaagtattttcccccacttgatgggttgtctcttcactttgttgtttgctttgcagaaggttcttagcttggcatgatcccatttgtccatttttgctttgcttgcctatgcttttaaggtcttactaagaaatatttggttctggagcatttccctaacgttttcttctagtagtttcaatagtttcaaatcttagattccagtcttcaagccattttgttttgatttttttaatatggcaaaagatagtgatctgtttcattcttctacatatagttatctagtttttccagaacaatttttggaagagaccatccttttcccaacgtatgttcttggcagctttgtcagaaattagttgactgtatatgtattgatttatttataggtcctctattctgttccgttagtctatgtgtctgtttttatgccagcaccatgctgttttgtttactatcactttgtagtataatttgaagtcaggtaatgtgatgcctccagctttattcttttgctcaggattgctttggctattcttggtcttattgtggttccatataaattttaggatttttttcctctttctgtgaagaatgtcattgatattttgatagggattacattgaatctgtagattgctctgggtagtatggaaattttaacaatattgattcttccaatccatgaacatggaatatatttccatttttgtgtgtcctcttcaatttctttcatcactggaaagatctctacaataaaaacaaaagtaaatttcttcgtggtacaagtaagtcttttaagataagaaattttaagattcctcccaagcaatactgaaaatttccaaaaggcagttattatctctgttatattaatcattatatccagagcccaacgtgtagcaaacagaagaccctctataatataggttgactgaataaatgaacctctatattttatggaattagtttgaggtttttatgttactttcatccctatagagccataaaatgaattttttggtgggggcacacaaaattgcaccacgacagcttttttctttaaaacaagcacaagaataaagctaaacgcaaatattcaccgcactggaaagcactgcgcgtgcgctatcttacgctattggctaacaccgcaactctcaaagaccctcgcaagagaatcacctttgcgcttgctcagttgtggactccacaaacagagggcgggttccaaagaaaaggaaatagtcattgcgcctgcgccgctccttctggggggaggggggggcttgggctggctgcgcaggcgcacaggtaccattttgaccgtaaacatcctgccgatttgaaccgaggatttgggcggcaggaagagccgcggcgtaacggcagccatcttgtttgtttgagtgaatcggaaaggaggcgccggctgtggcggcggcgggagctgctcggaagctacacctcgcaagggctcccccctttccccaccccctcccccgacccttttcccctccccgggccacccagcccgcccaactcccagcggagagcaaggtaagagactcggccgaccccttcttttcctccagctccctccccccaccctttccccgccgctctgccgtcggggagccggactcctgggggcgggagggcgagggagaaggcagccctcgccgcgcccacgcgtgctgccaccctcccggcgcccaagcggcggcgccacccgcccagcccccttcgccccgggcccgccctcggcccggacccatgcagcttgggcccgcatcatcgcttgttcggtaacaaatgattctgatccattctgagatctacaaaggctgttaccctgcaggtccatctcacgtcccccaggaggccggggaaaccctgggctgcggagggaggggaggaggtttgaacgagcccgctctggggaccgggccgcctactccgcgggtaaaaatggctgtctgggaggaggcggtggcgggcccggcgcccgcggtgccagccccgggagcagcaaccttccgccgaactcgggtgcggggctcaagaaagtgcggagctggtggggctgggcggggtggggcggggggtcggcgggtgcccctcggccagtgactgctgctgccctcccgttttaaaaagataatttttacgttgggaatgctgaatatttcacagacgcgtggaaaaagagacggagggaagttgcttctttttccaaggatatttgcataattggttttcccctgaacttttctgatcattctttaaagtgattaaggatatcgggtgttgtagagacgctctgggggaggtgtgtgtttctgataaatgcttgatgcccttttcgtcgctgaaaaaggctttttgcgaatgatccgctttgatagtgtggggtgacactgtcgggttgtgctgccagacttagcggccttcttcaaatttgtaagagggaaaccctgggggatttacttggtcactctgatttgttagtgtcttcagcgtgaaaaaaaaaacagcgtttgtgcgaagagtttctgggaaaggcttgtgtttatcggcttctttttgcaagggaaagttaatctttgttgtcattatactggttagaagagtaattggttttcaggcaaaaatttctattttcttaaattgggtgtaaatgccagcgggcagtgcgagtctatagaattttggagacaggcaggagaaggtttctcaaatcgtgaagtcattaaatacctttgttaatgtcggaggcaactaattatttttggaaaggcattgatgaggacatacgccatatctgatcttcaaataagttaacagtttgtatagttgaggtgacagcagtgcataactaatagacatagtgcttttttttatacacaagtcagaattacaaaagaatttctggtgaattattttgtgaaacatacaaattctaagaaacgcttttacagtttggtacagaatggaaattttctaattcttgagaaataaggttgtgtttttagtttaaatgtcaaaccagagttgttaggcatgattatactggctggttaatgttttgctgcaagattgtcttcagagttacttttcgcatcagcagtggcactatgttaggtgtgcccttgtatttaattttcataatcttttttgatgaatattatcccagtttatagttgagaagtaacttattcaccgttacaaaacaactgagcaaagagggagcttaatttgaacctacgactgtctgattgtaaaactcttggtcaaaggatgttagaaccaaaacagaggagatttctagtgtgcagggttagaaatatcttcagagatccttccccctactcccctgaagaggtagctccgttctgatctgagttaggtattgacgttttcaaaggttaggtaaaccaccagatttcaacctttcaggttttcatagtagggaaactgaactgcataaaggttaggcagcttaactgctagttaatgacaatagcaggattatgtctttacttctgagatagtagtttttactttgaataggtggtgtacatttatgtcccgagttaaaatatgtgtgtgtgtgtgtgtgtgtgtgtgtatgtatatatatatatcaaacagtacaaaaaggtaggcctcacttgccctgcatacctactttccagaggtaaccagtatcaccagtttcatgtgtacgccacaggtattttaagcttattcaagaactcgtaaatatatagagaaagagcattcttttttaaaactccaacttttttgcacttaacctggagattttccatgttagtacaaatgttgtattcttgtttaaagttgtactgtacaattgtcccttgatattaaaggggaattggttccagaaccaaaaccacgaatgctcaagtcgcttatatgaaatagtgtagtatttgcatataacctactaacatcccatatacttcaaatcatctccatttatgatattacaatgtaaatgctatgttaatagttaatatagttgttatagttttttattagtagtattttttattattgtgtttttttgtccccccctccaacaatttttgatcctgggttggtttagtccatggatgcaagaagccatggataaggaggaccgactatattccgttgtttgggtttattaatttttcatatcacttattgatggccaagtaggttatttcgaatgttctgttctgctctggcaaggcagcatagtgttgtagttagaagtgtggattctgaagttcaagttccacttccattaaatactagtgacatttacttatcttcatctgttttctccatctctaaaatgggccagtaatttacttctgtaggacagtcatgaagaggttggatacataaaacacgtagtgcttagtaagttttcttaggattttttcgtgtttggttttttggttttgtctttagtaatatgcatctccaagtatatcttttgtattgattactgaaagtgcaagttctggctagaaagtgtaagtgaaatttttataaaatgttgtcatattgtccttcagagaggacagtaccaatttacacaaccgcagtcctgccatgctttctaatgagtgaaatattggtaatgactgatactatcctagaagcatgagcctcagtttgattctttgaaacagtcttaaattgccattttttgtattcttgaatatgttctaa

SEQ ID NO: 97117 - DNA, 13535 bp, Homo sapiens
ccagctactggggaggctgaggcacgacaatctacagcctgggtgacacagtgagaccttgtcttaaaaaaaaaaaaaaaaaaaaactgcatgggaaaggtgccacacccacaggaccctgttcagggaagtcagctggccaggtcattagggttcctttggggtatctgggcggacaaggtgccggacatttgcaaaagcatggtcacagtgagtgggctgctctgagtttctgcttttaggctcagagttggtccctccaaccctcaggagtaggtcaaagcagaaggcactttctaagggtgtcacgagggtcctgctgggctgatccaggcagcaggacatggaggagagggcaggaacttcatcaatgtaagacaagccaagtctgtgcagagtcctgaccaggctgtctcagcactgtgctcaggttccagtggcagagggatcttggtggcaagtcttcgctgttcctgtctctgagtcactgggccccaggatagactggttgccctgtaggtctagggaatggctggagcctgggctctcccttcaccacccttgtggtgaagtgcctgtcaggttttaggggggcccacctcctggtaacttcttgagaaagagtgtgaaggaggtgcatgtttgggatggcagggtctgacaatgtctccattctagcttcatacttgacagtttcactgggtatcaaattctagatgggaaattctagattgggaaggattctccttcaaaggcatcgctctctcgctttcttattttctagcttccatggttgttgttcatgaagtctgaaggcactcagactcctaacccttgtaatgcgacctactaattctctgtggaagcttgtagaatcttctctttgctcccagtgttctgagatttcactttggtgagagtctatttccatccattaggttggatactggcaggctctttcaatctgaaaattcatggtcttcagttttggcatatttcttttttttttttctttttgagatggagtcttgctctgttgccgaggctggagtgcagtggcgcgatcttggctcactgcagcctccgcctcctgggttcaactgattctcctgcctcagcctcccaagtagctgggattacaggtgcgtgccaacacgcctggctaatttttgtatttttagtagagatggagttttgccaagttggccaggctggaatatttctttcttttttttttttttttttttttgagacagagtctcactctgttaccaggctggagtgcagtggcatgatctcagctcactgcaacttccgccccctgggttcaagccattctcctgcctcagcctcccaagtagctgggactacagatgtgcaccaccacgcctggctaattttttgtatttttagtagagacgggggtttcaccatgttggccaggatcgtcttgatcacctgacctcgtcatctacccgcctcgccctcccaaagtgctgggcatgagccaccacgcccagcctctttttcaatttgttgatttcttcactttttctttttggaattcctattgttggatattggctcccctgggctggccctctaatgtaccttttctgtcctatttcccttttttttttttggatggagtttcactcttgttgcccaggctggagtgcaatgatgtgatcttggctaaccacaacctccgcctacttggttcaagccattctccagcctcagcctcccgagtagctgggattacaggcatgcgccaccacgcccggctaattttgtatttttagtagagacagggtttctccatgttggtcaggttggtcttgaactcccgacctcaggtgatctgcctgcctcagcttcccaaagtgctgggattacaggcgtgagccactgcacccggccccccttttttttttttttttttgagatggggtcttgccatgttgcccaagctggttttgaaattcccgggctcaagtgatcctcccgcctcatcctcccaaaatgctgggattacaggtgttagccaccgtgccaagcctctttatcttccattaagtagttcatttctgctatcttgttttgcatgtccaacagctctttctgtaccccgtttcttttgatggcatcctgttgtttcagggacacaatatcttacacctctgaggctaatagtttattttttccttttggaattttctccctgaagtgtttcctcccaattgctttttgcttgtgaaggtctttgtttgtttgagacagtctcgctctgccgcccaggctggagtgcaatggcgccatctcagctctcactgcagcctccacctcccaggttcaatcgattctcctgcctcagcctccagagtagctgggattacaggtgtgtgccaccacgccctctaagcttgtgtaggtttctatcttccaggctgaaggtttttctcagatgtcaggtcacccttgagtatctgctcatattaggagtggggcagggctggagccatgaggcagatcggaagctctgagcacaagggtggtacttccttggaggagatcagggtgggtgggctcttgcttttatggaatgccccgaggtcagttttagatccctttccagtccttcctgggaagcctgtctgtggagcatctgtatgcacactgggttttctggtttcagtacatttcttgtctgtgtgtggtgacctctcagaacccctcagacttcggctgcagtgggagaggaccagttgctgagtggcagggatcttggcagtcacctggaagactggaaggggacatgaagggggcttctgggtggggacaacgtcctgggtgctacccacacagacttgttcacaccatgaatgtatcaagccatactctacctctgcagaaataaattgaggctggagcctagctcctggaggtttcgggcaaggtggggccggctctgctcctcttcagagcagccactttgtggatgtctgcagttgctccctcaacccacttcactccaggtctgcgagtccactcatccactgagtctgctcttgctccagtcgcagcgagccctcccgtaggtccaggcctcctcccttggcctctcagcagcactcgtgagcatcgccatattcatcttttttttttttttttgagaccgagtctcgctctgtcgcccaaactggagtgcagtggcgtgatctcggctcactgcaacctccgcctcccgggttcaagcgattctcctgtctcgccctcacgagtagctgggactacaggcgtgtgccaccacacccggctgatttttttttttttttaatttttagtagagacggggtttcaccatgttagccaggatggtctcgatctcctgacctcgtgatccgccagcctcggcctcccaaagtgctgggattacaggcgtgagccactgcgccgggctttttttgttcgtttgttttaaagacagggtctttccctgttgtccaggctggagtgcagtggctcaatcacagctcactgcagccgcgatctcccaggctcaatcaatcctcccacctcagcctcctgggtagctgtgactacaggcatgtgccaccatgcccggctaatttttatagttttggtagagatggggttgtgctatgttgccaaagatggtctccaactcctgggctaagtgatcctcccacctcagccttccaaaatgctgggattatagacgtgaccgtgcctagccatgttagtcttcagtacaccttctctttgctgacagccccgcgctcccatgctcctgccagcctctccagccgttccttcctggtctctggctggctctgcctcctcagctcagtgcccagatatgtttttccccagggctcagccttaggcattctccacagcctacgctcactccttgggcgacctcattcagtccctggctttaagaccccatcatgacgcagacccccagctcccgctccagcacagtgcttaccagagctccagactcatctcccactgcccccttcctgggcagccctacctggatgtctacaggcaccgcgagttcagcagtggccagaatgcttgacgtcctcccgcagacatgctattcccatctccccatctcagtgaatagcaccacattcactcaggtgaaaagcctgggagaaagcctggattcctttcacccacttcatttccaacccacccccaagtcctgctggctctactgttcctgcctcaatccacccgctttggtctctattgctcccctgaatccagatcatcatggccaaccctcctacccctccagccgccatgaagccaggagtcctttagaagtctatgattcccatcaccgcggggctggacagctctcttggggaccttccctgtgcacctgtgaccgtgtctgcccctcataacaccctagtcacaatgccctttcagttccccaaaaaagctagactggtcccacttctgggcctctgcctggagtattcacagaccctcagtcgggccccagcttggatgagtgtcagcagaggccctccccactccacctggattaaagcaggtctgcctggcgccctgcaccacacacccttccctccctcagcgtgtctggcccgaccagcacgcagcttccatgatggcagggcctggcctctcctgcacgccatgcaggcctggcccttgccaaccactggaccttagtaaatatttgaggagcaaaagaatgaaacgctaggtgggtgcatgagtggtggcagagtctggttctgaggtttctgagcttaaggccgtgcagcagctggctctgctcccttgagattctggtgcccactcccttgccaggtttcaggcacccgtggatgagcagtcagagagtctacagaacacgcacgacgacagcaggaacaacgcggcctcagccaggtaaagcaagtctctccactggagagtgtgcacgcgatgtggcttctgaggccaacaggacgacaaaggaaactccaggcttttcccctttggcgccagctctggggccctggctgggcctctttgtaaaacaaggggtcagagaggctctcagcccagatgagtaacttataagtgacctcatagataaaacaggtgttcctttgatagacagaaccccattttaccattataaacagccatggctgctgcctgcatccactttcaccactgggagctgcacgtgcttatgctaggggactcgggtcactgaaatgagaaagtgaccgaggactgttccccagagccagcgcatgcgccccagtacctgccagaggaagacggctgtgcattaacacctacgacacagtcacaggctgatctttgtgtattttgctttcaggaaaacatagtcacagggcagaggacagcactgtagaatgagaaccagaagagcctaggggtgtgcagagggttgctgaagtggccagagtcacagcgcggctggtgacagagcagagtctggccccagcctcccctgcacagccgccatttattagctcagatgcttccaaattcaaaatgcagtgtcaccagaaaccgctgacacaggctgatggttcagcaactcacagccatcccctggggatgggctcctactcagaagtagacaaggtccttttggagacagagccttcctggttctcactcactgaggccttccaggaagacgttccattctgagtgctttggcccaagtggattttagtgcagggatatggtgaaatgggggagcgggctgggcttacatgaggctgtccctttaggaataatccaggaagtgtcccggaaaagagagagaagacatcagagcctaaaggaaacagctgggctccgaacgccctctcagaagagcctctactgaaaaatatggatcatcacagatccaaacagaaaaatgggggcgatgtccccacatggagggaacacccgacttagcaaatgggaccggtccccagggtcaggctcttagagcaggcacaagactgggacactggacagaaggttgttcccatgatggttttttttattttttatttttgagatggagtttcgctctgttgcccaggctggagtgtaatggtgcratctcggctcactgcaacctctgcctcctgggttcaagcgattctcctgcctcagcctcccgagtagctgggattacaggcgcctgacaccacgccccgctaattttttgtatttttagtagagatggggtttcaccatgttggccaggctggtctcaaackccagacctcaggtgatccacctgcctcagcctcccaaagtgctgagattacaggggtgagtcaccgcgcctggccaatgttgttgttgtttttaagacagaatttcactctttgttgcccaggctggagtgcaatggcgcaatctctggctcaccgcaacctccgcctcccaggttcaagcgattctcctacctcagcccccagagtagctgggattacaggcatgtaccatcacacccggctaattttttgtattttaagtagagagggggtttctccatgttggtcaggctggcctcgaactcccaacctcaggtgatccgcccacctcggcctcccaaaatgctgggattacaggggtaagccactgtgcccggccggttatttctttaaaaggtaatcatttgtcaagagtaaaacccagaagctctgacaggccataatttcagatcctttggcttgggcagttttgattttccccgtgtttgcatggcatgaagtcttcgtccttgtcacagtagcttgggatgactcccagtccacatggaaaacatcagggagtgacaatccagcaagaaatccctcgctagttccacacctacgcaccgagcgtcggtgtgccaggccctgtgctgggcagagtgtggtatgtcagggtgtgccggttttaggtaacaagactccaccactgagtggcacctgccctattgcaaaggaatccagttcctccggaataacagtcccactgttaacctggtgctactgggaagttccacacagtaatctgagcagtgactcatggaaggatgaggaacgtttgctccagcttctctccctttccagcaagggcagagctcctaaagccaggggttagcacctggccagcttatgtggcagatggtctcagttacaacttcgctgctttcccaaactcctgcagccctcctgagtccgacttccgttgatagcaaggcactgggtggcagcaaccttttttctagtagttttttcccagcagttttccatttctccacagtatccttttcatttagaggagcttaataaatgctttttaaaaagtaacccacgtgacgtaaaattttacaagtttttgtggcaaaatgatgcccagatagtcacatttaagcaaatattcagcttgattcagtgattaacagcaaatgggtctacgtgctaacatggcagcacattcaacacataacacatcactcacattgacgtccactgtccctgcacctgctacttcaggggcactgaggctcctgttccaaggccttacaaacctatgtggtggcctgcagggcaaaaggaattatcattacaactggttagaggtaggaattcagaaagaaattgaggaggccaaacacacgtcgtttgaggctaaaggcttaagacgcttcttacccaagagtgacctcagagtttcacatcccagacaatcacactgtggttgagtgaaatcaagtgcagttttatttaagaactggaaagaataatcagtatctgtgaaagaaaatccaatttagaatatttaaataaacatttatgtaaaaagaagagtagaataattactccgttcagttcctctccttgcaatgggataggctgcctctgctgcagatggctgggtcttccaaacccatgacaagtgccacggcctctgcagcagtggcccagagagtaggcacttcccagcatgacagagaggccgaggccttctaaccttgccaaaccactacaaaagcaaactagggtgggcaagcccaactacctaaggcaggaagaaagtgcagtgaagggacagtggtgtgctgtgcgtatcgtgggggtactcctaagcagctagctgttggcgagatcttacaaagcctgatcggctaacgcagcttcctggtttaggaacattttccccggtcgtatcaatcccccaggttggtaaatgaacagaagggatgaataaagcctactttttaggctcaaggagcagctcgtgaaggggtggcaggtgcgctgctgccttgttttctgtcctgctaagaggctcaccccgcgacctcttctgtaaactgccactcagcagcggcctgcaagccctcacgaaaggcttcactctatgctgtttccaggtagctttgttctgacagtacctattttccacttcagaatctccactttaaaacctgcaatggaaaaataaatctcttgacagttttttaaatcgagaaaattggtgatgtggccttggcagcaaatacccagaaagcctttacctcattaacctgattctccacgggccctgccactgctaaatttataaagctaaaaataatctcaagatcatggaactaaaaagaagtcaatcacttaccaaatcctgtccttaaggagttcatcttggctgggcgtggtggctcacgcctgtaatcccagcactttgggaggccgaggcgcgtggatcacttgaggtcaggagttcgagaccagcctggccatcatggtgaaaccccgtctctactaaaaatacaaaaaaattagctgggcatggtggcccaagcctgtaatcccagctactcaggaggctgaggcaggagaatcgcttgaacccgggaggcagaggttgcggtgagccgaaatggtgccactgcactccagcctccagcctgggccacagagcaagactgtcttaagaaaataaaaaaaatggagttcatcttttatccctaagtaattgctgacttctgctctgggattataaacagggtgggaatgttctcccaccatccctacccctggaattcctctccaaagcagagtacgtcaagttttccctggtgtcagacagcatttcaccatgaaaccctaagacctgcctcctgggctccttccagctggtgggcctggtgtgaaggtgggcttcctgggcctctggcagatggaggatggcattaaatgccaacacagtcagcttaccatccacaaggccagcagctgccaacagctgccctagacctatcaacaagacaacttcatggctcccaatgggaatggaggctgggcccgccctacttagagcaggggaaagaacttttccctcaaagagccggggcaggatgccagaatctaactacatcctctcccggtttgcagttctaggaagtggaatttgctgccctaggcgtggtctaaaggacaagtttagaaatgattcaactcaagttcctaaacagagtaagtgccagttgatgtcccaccgtggatcctttactccagaaaaattgtaatgatggctcggccaccgccttggctagagtcccactgcacgcgtgtcgtgagggccgatgggcaagtccgtccggttttttttgttgttgttgttgttttttgagatggagtctcgccctgttgcccagactgaagtgcaaaggcccgatctcaactcactgcaacctccgcctcctgggttcaaaggattctcctgtctcagcctcctgagtagctgggattacaggcacccgccagcacgcccagctatttttttgtatttttagtagagacggggttttatcatgttggccaggctggtctcgaacgcctgacctcatgatccacccgccttggcctcccaaattgctgggattacaggcgtgagccaccgcgcccggccgtctgtctggttttcaaaccaatcaatgaacccgtaagcctctttggtatatataacaatgaaaaaattcattaagccatgaaatctagaaataagtcatatttctgagttgataaaatgcttttctgaacatacattttaggtatctggcacaattaaccaaatgtctgcccatttttgtgtagctttcatacagtacagatttcattgatgtcgctcccacatctgagtattaaaaacatttgacattgttcttctcagtcctcacaacacccctgtgaggtaggtggtattgaccccattccacagatggggaggtctaggcacggaaaggtttagtggctcctcacaggccgcgtggtggggcagcagagtggtgctctggccccgcgccgacgccgccttcacattcacacttcttcagtgccaccgcaacactgcatggcaggatctcacgctgaggccaagttcctgtctagtccagaatgaagccagcgtctcacctcttaaagcttcgatgtgtgactcaaagccaacttactctcccaaacttgcaaaacaaacatactgactgaatcttagttgggactatttgcagtatttaagattatttttgagagtcaatctgcttggatttgtagttgtatatgctcaaatccctttggaaaacagtttgaaatgacatgagggacaatgtaattttgagaacagaacacagaaaacaagagttctgagactggcattgaaattgagaatataagctatggtaaaatgagaatcaaatcccaaataaacggagagcagcacttctcaatgtttaaggccacgcacagggcaggcattcagtaagcacttcttggatcaaaagaaactgatgctcctttgagccgcctatcactgacaacaggagctgagacccccgggaaagccagccagggccatgatccccttggcctggggccacggtcacacaaagccactcagccaaatcgtgtagagttatctaggcttacttgctgcaggataaaagttgaactagaacaccaagcattgagctaggaatacccctttgaatgtgtactgctacttataaaaaataggtatgtagctatgattaaatagatgaagggccaaagcatcctatgaggaagtatttttaaaattgtatagatgttcatgcagtgggggacagaaataaagaggttaaagcggtctgtgtttttcggttaaatgaaaggttgtaaatgcatttttaccgctgataagaaggggtacctgctacccctttctgctgtggagtgttgctgaggacagagtccatctctcccagcgagtcctggttatcctttacttacactctggcctcgggggcagtggcgtgtggcctcggtcctccccaggtaactctggagggcgctgtggaatattgctgtgatttgccccttactcgtctttcacccatgttccgccttgattcggcataaggacagactgctccagtggggccttgggtcctcaggccttctgaccgcttggtcttgagtgacattccagaagagtgactaatgacataaaacgattaagaaaatccatgtggcagcggccaaccggaaacagttttgtcccaggctgcacagggtcggaggccccaaggtcaccggggccactgcccgtcacaggtccaccttgaccccctttatgaaaggcaggcccgtgggcaccctcttcttatactccaggtactcctctccaaaaaagtgaattagtgagatttcttcttcttctgttcgatcgcggaagaatcgccacactgtcagggcatagctgacgccgcagatggggttacacagcatcacctaacagagggagacaccaggctcatcagggtgaccgtgggatgacgccctgtgctttggtaggcgtctgtctctaatacccagaggatttctgtgcccatgccctgctgagaccgtcagggtctctgggagcagtactgtcaccttagccctgagcactcagtgctgcaggcctttctcacgtgctttcctgttgctcctcttacatgagagagatctgtaaatcacaagatcaacctcttggatttcaaccctcagcttggggtgacagcaatgccccccacctccaggtgtgagctccccaacatgaggtcccatgcacgctgccttcctgcccaggaccctcccaccacaaatgcattcgcttacaccacagctgcctgggcctctgcctcctaaacccacagcctctgcttcagcacgagatacagtgccacaaaactcagcttccgaaatgccccttccagcagattacctccacgctcagagagctccagagactgaaccccaccccctgagtctgggtttccaaccccagaagagcagcacttcgcccacttccccagtctcctgccctccccacgctgtgcccactttgcctcttttttttcccccgagacagattgtcactctgtcacgtggagtgcagtggcgtgatcatggctcactgcagccttaactgcttgggctcaagtgattctcccacctcagcctcccaagtagctgggactaagggcacatgccaccacacccagctaatttttgtattttttgtagagatggggtttcacaatgttgcccaagctggtctcgaactcctggccctttcttccacctttaagaacatcctggccaggtacggtggctcatgtctgttaattgcagtactttgggaggccaaggagggcagatcacctgaggtcaggagcttgagacaagcttggccaacatggcgaatccccgtctctaccaaaaatagaaaaattagctgggcgtagtggtgggagcctgtaatcccagctacttgggaggctgaggcaggagaattgcttgaacccaggaggcagaggttgcagtgagctgagatcgccactgcataccagcctgggcgacagagcgaaactccctctcaaaaaaaacaaagaacatccttcccactgatctccagccaaacagtccttcaaggccaaaagcattccccagctcctcagggaaccactcacctacacctgcccactggtcccctgtggatgtgcatcttccccaacatacattttctgtatgttttctgaatatatattttaggctccaatacagccacccggagagccaggctcatgtcctgacctctcacaccttctcttattgagcacttactatgttcccagcgccatgctaagccctttacaatcattaccctgttcaactctcatggcaaacctttgagggcacgctactatccccactttgttttttttaaaattttattattttttaaagacagggtctcactatattgcccaggctggacttgaactcttggcctcaagccatcctcctgcctcagcttccagagtagggggaactacaggcatgtgccactatgtctagctgcccccactttaacatgagaggagaaggaggccaagcagtgaatgtcagaatcaggactggccc
